(19) United States
(12) Patent Application Publication
(10) Pub. No.: US 2014/0371098 A1
(43) Pub. Date: Dec. 18, 2014

(54) MARKER SEQUENCES FOR BREAST CANCER AND THE USE THEREOF

(71) Applicant: Protagen AG, Dortmund (DE)

(72) Inventors: Angelika Lüking, Bochum (DE); Axel Kowald, Bochum (DE); Annabel Höpner, Bielefeld (DE); Christian Scheer, Dortmund (DE); Heidelinde Fiegl, Ellbögen (AT); Günter Daxenbichler, Innsbruck (AT)

(73) Assignee: Protagen AG, Dortmund (DE)

(21) Appl. No.: 14/367,276

(22) PCT Filed: Dec. 24, 2012
(86) PCT No.: PCT/EP2012/076875

§ 371 Date: Aug. 25, 2014

(30) Foreign Application Priority Data
Dec. 22, 2011 (EP) 11195459.0

(51) Int. Cl. G01N 33/574

(52) U.S. Cl. CPC G01N 33/57415; G01N 2500/04; G01N 2500/20
USPC 506/9; 530/350; 506/18; 536/23.5

(57) ABSTRACT

The present invention relates to a method for identifying marker sequences for breast cancer, the marker sequences identified with the aid of this method and diagnostic use thereof, diagnostic devices containing marker sequences for breast cancer, in particular an arrangement and a protein array, and use thereof. The invention also relates to method for the screening of potential active agents for the treatment and prevention of breast cancer by means of these marker sequences.

[0001] The present invention relates to a method for identifying marker sequences for breast cancer, the marker sequences identified with the aid of this method and diagnostic use thereof, diagnostic devices containing marker sequences for breast cancer, in particular an arrangement and a protein array, and use thereof. The invention also relates to methods for screening potential active agents for the treatment and prevention of breast cancer by means of these marker sequences.

[0002] Protein arrays are gaining increasing industrial importance in analysis and diagnosis as well as in pharmaceutical development. Protein arrays have become established as screening tools.

[0003] Here, the rapid and highly parallel detection of a multiplicity of specifically binding analysis molecules in a single experiment is made possible. To produce protein arrays, it is necessary to have the required proteins available. In particular, protein expression libraries have been established for this purpose. High-throughput cloning of defined open reading frames is one possibility (Heyman, J. A., Cornthwaite, J., Foncerrada, L., Gilmore, J. R., Gontang, E., Hartman, K. J., Hernandez, C. L., Hood, R., Hull, H. M., Lee, W. Y., Marcil, R., Marsh, E. J., Mudd, K. M., Patino, M. J., Purcell, T. J., Rowland, J. J., Sindici, M. L. and Hoeffler, J. P. (1999) Genome-scale cloning and expression of individual open reading frames using topoisomerase I-mediated ligation. Genome Res, 9, 383-392; Kersten, B., Feilner, T., Kramer, A., Wehrmeyer, S., Possling, A., Witt, I., Zanor, M. I., Stracke, R., Lueking, A., Kreutzberger, J., Lehrach, H. and Cahill, D. J. (2003) Generation of Arabidopsis protein chip for antibody and serum screening. Plant Molecular Biology, 52, 999-1010; Reboul, J., Vaglio, P., Rual, J. F., Lamesch, P., Martinez, M., Armstrong, C. M., Li, S., Jacotot, L., Bertin, N., Janky, R., Moore, T., Hudson, J. R., Jr., Hartley, J. L., Brasch, M. A., Vandenhaute, J., Boulton, S., Endress, G. A., Jenna, S., Chevet, E., Papasotiropoulos, V., Tolias, P. P., Ptacek, J., Snyder, M., Huang, R., Chance, M. R., Lee, H., Doucette-Stamm, L., Hill, D. E. and Vidal, M. (2003) C. elegans ORFeome version 1.1: experimental verification of the genome annotation and resource for proteome-scale protein expression. Nat Genet, 34, 35-41; Walhout, A. J., Temple, G. F., Brasch, M. A., Hartley, J. L., Lorson, M. A., van den Heuvel, S. and Vidal, M. (2000) GATEWAY recombinational cloning: application to the cloning of large numbers of open reading frames or ORFeomes. Methods Enzymol, 328, 575-592). However, such an approach is closely linked to the progress of the genome sequencing projects and the annotation of these gene sequences. In addition, the determination of the expressed sequence is not always clear due to differential splicing processes.

[0004] This problem can be avoided by the use of cDNA expression libraries (Bussow, K., Cahill, D., Nietfeld, W., Bancroft, D., Scherzinger, E., Lehrach, H. and Walter, G. (1998) A method for global protein expression and antibody screening on high-density filters of an arrayed cDNA library. Nucleic Acids Research, 26, 5007-5008; Büssow, K., Nordhoff, E., Lübbert, C., Lehrach, H. and Walter, G. (2000) A human cDNA library for high-throughput protein expression screening. Genomics, 65, 1-8; Holz, C., Lueking, A., Bovekamp, L., Gutjahr, C., Bolotina, N., Lehrach, H. and Cahill, D. J. (2001) A human cDNA expression library in yeast enriched for open reading frames. Genome Res, 11, 1730-1735; Lueking, A., Holz, C., Gotthold, C., Lehrach, H. and Cahill, D. (2000) A system for dual protein expression in Pichia pastoris and Escherichia coli, Protein Expr. Purif., 20, 372-378). Here, the cDNA of a specific tissue is cloned into a bacterial or eukaryotic expression vector, such as yeast. The vectors used for the expression are generally characterised in that they carry inducible promoters that may be used to control the time of protein expression. In addition, expression vectors have sequences for what are known as affinity epitopes or affinity proteins, which on the one hand permit the specific detection of the recombinant fusion proteins by means of an antibody directed against the affinity epitope, and on the other hand the specific purification via affinity chromatography (IMAC) is rendered possible.

[0005] By way of example, the gene products of a cDNA expression library from human foetal brain tissue in the bacterial expression system Escherichia coli were arranged in high-density format on a membrane and could be successfully screened with different antibodies. It was possible to show that the proportion of full-length proteins is at least 66%. Additionally, the recombinant proteins from expression libraries could be expressed and purified in a high-throughput manner (Braun P., Hu, Y., Shen, B., Halleck, A., Koundinya, M., Harlow, E. and LaBaer, J. (2002) Proteome-scale purification of human proteins from bacteria. Proc Natl Acad Sci USA, 99, 2654-2659; Bussow (2000) supra; Lueking, A., Horn, M., Eickhoff, H., Bussow, K., Lehrach, H. and Walter, G. (1999) Protein microarrays for gene expression and antibody screening. Analytical Biochemistry, 270, 103-111). Such protein arrays based on cDNA expression libraries are disclosed in particular in WO 99/57311 and WO 99/57312.

[0006] Furthermore, in addition to antigen-presenting protein arrays, antibody-presenting arrangements are likewise described (Lal et al (2002) Antibody arrays: An embryonic but rapidly growing technology, DDT, 7, 143-149; Kusnezow et al. (2003), Antibody microarrays: An evaluation of production parameters, Proteomics, 3, 254-264).

[0007] Breast cancer (breast carcinoma) is the most common malignant tumour of the human mammary gland. It occurs primarily in women; only approximately every hundredth occurrence of these cancer diseases occurs in men. In Western countries, breast cancer is the most common form of cancer in women and more women die from breast cancer than from any other cancer disease. Most diseases occur sporadically (randomly), however there are hereditary and acquired risk factors. Numerous national and international programmes for the early detection and structured treatment are intended to reduce the mortality rate.

[0008] Approximately 80 to 90% of all tumours in the female breast are discovered randomly by the women themselves. These palpable and visible tumours are often relatively large when they are discovered and are therefore usually associated with a poor prognosis. By consistent early detection of smaller, impalpable tumours, the mortality rate could be reduced significantly. Programmes for systematic self-examination, palpation examination by the doctor and screening mammography with the aid of imaging methods as well as biopsy are used for early detection.

[0009] In the case of breast cancer, early diagnosis is key for the further development of the disease and the prognosis. Although numerous tumour markers are associated with breast cancer, these are not suitable for early detection, since they have inadequate specificity. They are used predominantly for the monitoring of the course of the disease or of the response to therapy.

[0010] US 2003/198972 A1 discloses the identification and use of gene expression patterns that are associated with different stages of breast cancer. The expression patterns are obtained here by comparative analysis of the gene expression in healthy female patients and in female patients with benign changes and in female breast cancer patients. In these studies, the sample is removed from the patients by non-invasive flushing of the mammary duct, is examined microscopically and degenerated cells are harvested from the sample. RNA is extracted from these cells, amplified, labelled and then brought into contact with microarrays equipped with polynucleotides. The intensity pattern is analysed and enables an assignment to different stages of breast cancer. US 2003/198972 A1 in this regard specifies individual genes of which the expression pattern is modified in conjunction with breast cancer. US 2003/198972, however, does not disclose any new marker sequences for detection of these genes.

[0011] Karen S. Anderson et al. (Journal of Proteom Research (2011) vol. 10, Nr. 1, pages 85-96) discloses the detection of autoantibodies against tumour-associated proteins with the aid of protein microarrays and the application for early detection of invasive breast cancer. The protein microarrays used here are produced in that full-length clones of the cDNAs coding for potential tumour-associated antigens are printed onto the support, expressed and then tested comparatively with the sera of female breast cancer patients and control individuals, specifically healthy subjects and those with benign breast diseases.

[0012] US 2012/021887 discloses the use of arrangements and protein microarrays with marker sequences for breast cancer for the detection of breast cancer-specific autoantibodies.

[0013] There is a need, however, for indication-specific diagnostic devices and methods for breast cancer, in particular for the early detection of breast cancer, for the distinction of breast cancer and benign changes to the breast and for the prediction of the risk of metastasis formation. The object of the present invention is to provide improved means for the early detection and therapy control in the case of breast cancer.

[0014] The invention relates to a method for identifying marker sequences for breast cancer, characterised in that
[0015] a. marker sequence candidates for breast cancer are identified in that a support, on which at least 1,000 different proteins are immobilised, is brought into contact with a serum sample from a female patient with breast cancer and proteins are identified that demonstrate an interaction with the serum (marker sequence candidates), and
[0016] b. the interaction of one or more marker sequence candidates from a. with the serum of female patients with breast cancer is determined compared with the interaction of the marker sequence candidate(s) from a. with the serum of female patients with benign changes and
   [0017] the interaction of the marker sequence candidate(s) from a. with the serum of healthy control individuals, and
[0018] c. marker sequences are identified in that they demonstrate an interaction with the serum from female patients with breast cancer that is different compared with the interaction with the serum from female patients with benign changes and the serum of healthy control individuals.

[0019] In one embodiment of the method, at least 5,000, preferably at least 10,000, different proteins are immobilised simultaneously on the support according to a.

[0020] For example, the comparative evaluation of the data concerning the interaction from b. is performed by means of statistical analysis, for example as described in the examples.

[0021] In a particularly preferred embodiment of the method, marker sequences for breast cancer are identified that are specific for breast cancer with a high risk of metastasis formation.

[0022] With the aid of the method according to the invention, marker sequences for breast cancer can be identified that are highly specific. Marker sequences that are found with this method on the one hand enable the early detection of breast cancer, for example of preliminary stages thereof, and on the other hand enable the distinction of breast cancer or preliminary stages thereof from benign changes. An early diagnosis and optionally a targeted treatment and also a considerably improved prognosis are thus possible. In addition, further patient data is included in the evaluation, such as a certain case history, lifestyle and in particular the risk of metastasis formation. Marker sequences for breast cancer that already in the early stage enable a prognosis with regard to the progression and/or the risk of metastasis formation can thus be identified with the method according to the invention. The prognosis with regard to the risk of metastasis formation also enables an improved therapy and a selective monitoring of the patient in view of metastatisation.

[0023] In contrast to the experiments described in the prior art by Karen S. Anderson et al. (above), marker sequences that are more specific, for example because they not only enable the discrimination of metastatisation from non-malignant changes of the tissue (benign change), but also enable an assertion with respect to the prognosis, for example in view of the risk of metastatisation, and thus the selective monitoring and therapy of these patients, are identified with the aid of the method according to the invention. The marker sequences according to the invention are particularly suitable for the analysis of bodily fluids, such as serum. A quick and cost-effective use or application of the marker sequences according to the invention is thus possible.

[0024] The invention also relates to the marker sequences for breast cancer identified with the method according to the invention. The invention relates to marker sequences for breast cancer obtainable by a method according to the invention and selected from the sequences comprising SEQ ID No. 1-1473 and partial sequences of SEQ ID No. 1-1473 with at least 90%, preferably 95%, of the length of the sequences SEQ ID No. 1-1473, and homologues of SEQ ID No. 1-1473 and partial sequences thereof with an identity of at least 95%, preferably 98% or more, to the corresponding nucleic acid and/or protein sequences, and sequences coded by SEQ ID No. 1-491, partial sequences thereof and homologues.

[0025] The invention also relates to an arrangement comprising one or more marker sequences according to the invention.

[0026] The invention also relates to a protein array comprising one or more marker sequences according to the invention.

[0027] The invention also relates to a diagnostic tool comprising one or more marker sequences according to the invention and optionally further additives and/or excipients.

[0028] The invention also relates to a test kit comprising one or more marker sequences according to the invention and optionally further additives and/or excipients.

[0029] The invention also relates to an arrangement according to the invention, characterised in that 2 or 3, preferably 4 or 5, particularly preferably 7 or 8 or more, different marker sequences for breast cancer are used simultaneously.

[0030] The invention also relates to a protein array according to the invention, characterised in that 2 or 3, preferably 4 or 5, particularly preferably 7 or 8 or more, different marker sequences for breast cancer are used simultaneously.

[0031] The invention also relates to a diagnostic tool according to the invention, characterised in that 2 or 3, preferably 4 or 5, particularly preferably 7 or 8 or more, different marker sequences for breast cancer are used simultaneously.

[0032] The invention also relates to a test kit according to the invention, characterised in that 2 or 3, preferably 4 or 5, particularly preferably 7 or 8 or more, different marker sequences for breast cancer are used simultaneously.

[0033] The invention also relates to the use of one or more marker sequences according to the invention, an arrangement according to the invention, a protein array according to the invention, a diagnostic tool according to the invention or a test kit according to the invention for the early detection, diagnosis, prognosis, therapy control and/or aftercare in the case of breast cancer.

[0034] The invention also relates to the use of one or more marker sequences according to the invention, an arrangement according to the invention, a protein array according to the invention, a diagnostic tool according to the invention or a test kit according to the invention for distinguishing breast cancer from benign changes and/or for prognosis, for example in respect of the risk of metastasis formation.

[0035] The invention also relates to the use of one or more marker sequences according to the invention, an arrangement according to the invention, a protein array according to the invention, a diagnostic tool according to the invention or a test kit according to the invention for individualised diagnosis and/or therapy in individual patients, patient groups, cohorts, population groups, variants of breast cancer, or stages of breast cancer.

[0036] The invention also relates to the use of one or more marker sequences according to the invention, an arrangement according to the invention, a protein array according to the invention, a diagnostic tool according to the invention or a test kit according to the invention for the detection and/or for the determination of the quantity of one or more breast cancer-associated autoantibodies, for example in bodily fluids, such as serum, tissue or tissue samples from the patient.

[0037] The invention also relates to the use of one or more marker sequences according to the invention, an arrangement according to the invention, a protein array according to the invention, a diagnostic tool according to the invention or a test kit according to the invention for the analysis of autoantibody profiles of patients, in particular for the qualitative and/or quantitative analysis of autoantibodies and/or for the monitoring of changes of autoantibody profiles, for example in bodily fluids such as serum, tissue or tissue samples from the patient.

[0038] The invention also relates to the use of one or more marker sequences according to the invention, an arrangement according to the invention, a protein array according to the invention, a diagnostic tool according to the invention or a test kit according to the invention for the screening of substances (active agents) for breast cancer.

[0039] The invention also relates to a target for the treatment and/or therapy of breast cancer, wherein the target is selected from the marker sequences SEQ ID No. 1-1473 according to the invention and partial sequences of SEQ ID No. 1-1473 with at least 90%, preferably 95%, of the length of sequences SEQ ID No. 1-1473, and homologues of SEQ ID No. 1-1473 and partial sequences thereof with an identity of at least 95%, preferably 98% or more, to the corresponding nucleic acid and/or protein sequences and sequences coded by SEQ ID No. 1-1491, partial sequences thereof and homologues thereof.

[0040] The invention also relates to a method for the early detection, diagnosis, prognosis, therapy control and/or aftercare in the case of breast cancer, wherein

a.) a marker sequence or a number of marker sequences selected from the group comprising the sequences SEQ ID No. 1-1473 and partial sequences of SEQ ID No. 1-1473 with at least 90%, preferably 95%, of the length of the sequences SEQ ID No. 1-1473, and homologues of SEQ ID No. 1-1473 and partial sequences thereof with an identity of at least 95%, preferably 98% or more, to the corresponding nucleic acid and/or protein sequences and sequences coded by SEQ ID No. 1-491, partial sequences thereof and homologues thereof is/are applied to a support,
b.) is/are brought into contact with bodily fluid or tissue sample from a patient, and
c.) an interaction of the bodily fluid or of the tissue sample with the marker sequence(s) for breast cancer from a.) is detected.

[0041] The breast cancer-specific marker sequences SEQ ID No. 1-491 have been described here for the first time. What is common to all of these sequences is that they have been identified by means of a protein array and the method described in the examples. The invention therefore also relates in particular to the breast cancer-specific marker sequence selected from the sequences comprising SEQ ID No. 1-491 and partial sequences of SEQ ID No. 1-491 with at least 90%, preferably 95%, of the length of the sequences SEQ ID No. 1-491, and homologues of SEQ ID No. 1-491 and partial sequences thereof with an identity of at least 95%, preferably at least 98% or more, to the corresponding sequences and proteins/peptides coded by the sequences SEQ ID No. 1-491, coded by the partial sequences, and the homologues.

[0042] Within the scope of this invention, a breast cancer-specific use for the proteins SEQ ID No. 983 to 1473 and/or partial sequences of these proteins and/or proteins coded by sequences SEQ ID No. 1-491 and/or proteins coded by sequences SEQ ID. No. 492-982 and/or coded by partial sequences of SEQ ID. No. 1-982 has been found for the first time and has been implemented in the arrangement according to the invention, the diagnostic tool according to the invention, the test kit according to the invention and the protein array according to the invention.

[0043] The invention thus provides marker sequences and arrangements of marker sequences for breast cancer that can be used within the scope of individualised diagnosis and therapy, for example in order to diagnose breast cancer and to monitor the therapy in a targeted and individually adapted manner in different patients, patient groups, cohorts, population groups, variants of breast cancer and stages of breast cancer.

[0044] The invention relates to the use of one or more marker sequences for breast cancer (=breast cancer-specific marker sequences), wherein the breast cancer-specific marker sequence(s) is/are selected from the sequences SEQ ID No. 1-1473 and partial sequences of SEQ ID No. 1-1473 with at least 90%, preferably at least 95%, of the length of SEQ ID No. 1-1473, and homologues of SEQ ID No. 1-1473 and partial sequences thereof with an identity of at least 95%, preferably at least 98% or more, to the corresponding sequences and proteins/peptides coded by the sequences SEQ ID No. 1-491, coded by partial sequences thereof, and homologues for breast cancer diagnosis and therapy, in particular for the early detection of breast cancer, for the diagnosis of breast cancer, for the prognosis, for example of the risk of metastasis formation, therapy control, for example prediction and monitoring of the response to a drug or a therapy, or aftercare. In particular, the invention also relates to the detection and the determination of the quantity of at least two different autoantibodies in a patient, wherein at least two different breast cancer-specific marker sequences according to the invention are used accordingly (as antigens).

[0045] The invention also relates to an arrangement according to the invention of one or more breast cancer-specific marker sequences on a support for the analysis of breast cancer-associated autoantibody profiles, early detection, diagnosis, prognosis and/or therapy control in the case of breast cancer, wherein the breast cancer-specific marker sequence(s) is/are selected from group SEQ ID No. 1-1473 and partial sequences of SEQ ID No. 1-1473 with at least 90%, preferably at least 95%, of the length of SEQ ID No. 1-1473, and homologues of SEQ ID No. 1-1473 and partial sequences thereof with an identity of at least 95%, preferably at least 98% or more, to the corresponding sequences and proteins/peptides coded by the sequences SEQ ID No. 1-491, coded by partial sequences thereof and homologues.

[0046] The invention also relates to an arrangement according to the invention or a use according to the invention of one or more breast cancer-specific marker sequences, wherein at least 2, for example 3 to 5 or 10, preferably 30 to 50 or 50 to 100 or more breast cancer-specific marker sequences are determined on or relative to a patient to be tested.

[0047] The invention also relates to a use, arrangement, protein array, diagnostic tool or test kit according to the invention, wherein the breast cancer-specific marker sequence(s) is/are applied to a solid support, in particular a filter, a membrane, a bead or small plate or bead, for example a magnetic or fluorophore-labelled bead, a silicon wafer, glass, metal, plastic, a chip, a mass spectrometry target or a matrix.

[0048] A particular embodiment concerns the use of a filter as a solid support. Furthermore, PVDF, nitrocellulose or nylon is preferred as a filter (for example Immobilon P Millipore, Protran Whatman, Hybond N+Amersham).

[0049] A further embodiment concerns an arrangement/use, characterised in that the breast cancer-specific marker sequence(s) is/are present as clone(s). The invention therefore relates to the use of breast cancer-specific marker sequences for the diagnosis of breast cancer, wherein at least one breast cancer-specific marker sequence of a DNA, in particular a cDNA selected from the group SEQ ID No. 1-491 or RNA selected from the group 492-982 or a partial sequence or a fragment or a homologue sequence thereof is determined on or relative to patients to be tested.

[0050] The provision of breast cancer-specific marker sequences (also referred to as marker sequences according to the invention) allows a reliable diagnosis and stratification of patients with breast cancer, in particular by means of a protein array.

[0051] The breast cancer-specific marker sequences according to the invention were able to be identified by means of differential screening of samples, more specifically from healthy test subjects, with patient samples with breast cancer. Here, these marker sequences according to the invention were able to be identified for the first time by means of protein arrays (see the examples).

[0052] The invention also relates to a method for identifying marker sequences for breast cancer, comprising the following steps:

a) providing sequences on an array,
b) identifying marker sequence candidates for breast cancer by comparative analysis of the signals measured in the event of contact of the marker sequences with bodily fluid or tissue sample from a patient with breast cancer and bodily fluid or tissue sample from a patient without breast cancer,
c) characterisation the marker sequence candidates for breast cancer with the aid of a protein array,
d) selecting marker sequences for breast cancer, which deliver a different signal in the case of patients with breast cancer and patients without breast cancer (breast cancer-specific marker sequences).

[0053] The term “breast cancer” comprises a group of diseases that can be preliminary stages of breast cancer and the establishment thereof as breast cancer or breast carcinoma (definition for example in accordance with Pschyrembel, de Gruyter, 263^{rd} edition (2012), Berlin). Variants of breast cancer and stages of breast cancer can also be inferred from the definition according to Pschyrembel.

[0054] In a further embodiment of the invention, the marker sequences according to the invention can also be combined with, supplemented or extended by known biomarkers for this indication. However, at least 50%, preferably 60%, particularly preferably 70% or more, marker sequences according to the invention are represented here, for example in the arrangement according to the invention, the protein array according to the invention, the diagnostic tool according to the invention or the tool kit according to the invention. In particularly preferred embodiments of the invention, in particular of the arrangement according to the invention, the assay according to the invention and protein array and also the use according to the invention, at least 75%, preferably 80% or 85%, particularly preferably 90% or 95%, of marker sequences according to the invention are represented.

[0055] In a preferred embodiment, the breast cancer-specific marker sequences are determined outside the human body, and the determination is performed in an ex vivo/in vitro diagnosis.

[0056] The invention also relates to an assay or protein array comprising an arrangement/use according to the invention. The invention relates to a diagnostic device and/or an assay, in particular a protein array, that allows an early detection, diagnosis, prognosis, stratification and/or testing for breast cancer.

[0057] The invention also relates to the use of an arrangement according to the invention or of an assay or protein array according to the invention for the analysis of autoantibody profiles of patients, in particular for the quantitative analysis and/or for the monitoring of changes of autoantibody profiles of patients.

[0058] The invention also relates to a diagnostic tool (test kit) for the early detection and/or diagnosis of breast cancer and/or prognosis and/or prediction of the risk of metastasis formation in the case of breast cancer, comprising an arrangement according to the invention, preferably on a support or an assay or protein array according to the invention and optionally further additives and excipients.

[0059] The invention also relates to a diagnostic tool (test kit) for therapy monitoring and/or aftercare in the case of breast cancer, comprising an arrangement according to the invention or an assay or protein array according to the invention and optionally further additives and excipients.

[0060] In a further embodiment of the invention, the invention relates to the use of breast cancer-specific marker sequences as diagnostic agents, wherein at least one marker sequence of a cDNA is selected from the group SEQ ID No. 1-491 (clone sequences) or SEQ ID No. 492-982 (RNA) or is a protein coded by SEQ ID No. 1-982 or a partial sequence or fragment thereof.

[0061] The invention also relates to a method for the early detection and diagnosis of breast cancer, wherein

a.) a breast cancer-specific marker sequence or a number of breast cancer-specific marker sequences selected from the group of sequences SEQ ID No. 1-1473 and partial sequences of SEQ ID No. 1-1473 with at least 90%, preferably at least 95%, of the length of SEQ ID No. 1-1473 and homologues of SEQ ID No. 1-1473 and partial sequences thereof with an identity of at least 95%, preferably at least 98%, or more, to the corresponding sequences and proteins/peptides coded by the sequences SEQ ID No. 1-491, coded by partial sequences thereof and homologies is/are applied to a support and
b.) is/are brought into contact with bodily fluid or tissue sample from a patient, and
c.) an interaction of the bodily fluid or tissue sample with the breast cancer-specific marker sequences from a.) is detected.

[0062] A particular embodiment of the invention concerns methods for the early detection and diagnosis of breast cancer, wherein the interaction according to c.) indicates a breast cancer-associated autoantibody profile of the patient or of a cohort or of a population group or of a specific disease progression (prognosis) or of a certain response to a therapy/drug.

[0063] A breast cancer-specific marker sequence or a number of breast cancer-specific marker sequences is/are used in a diagnosis method and/or in a diagnostic agent and/or in a test kit. In a preferred embodiment, at least 2, for example 3, 4, 5, 6, 7, 8, 9, 10, preferably 15 to 20 marker sequences or 30 to 50 or 100 or more breast cancer-specific marker sequences are used together or in combination, for example directly in succession or in parallel.

[0064] An interaction of the bodily fluid or of the tissue sample with the breast cancer-specific marker sequence or marker sequences can be detected for example by means of a probe, in particular by means of an antibody.

[0065] A particular embodiment of the invention relates to the method, wherein the stratification or the therapy control comprises decisions for the treatment and therapy of the patient, in particular hospitalisation of the patient, use, efficacy and/or dosage of one or more drugs, a therapeutic measure or the monitoring of the course of a disease and the course of therapy, aetiology or classification of a disease including prognosis. The invention also relates to a method for the stratification, in particular the risk stratification and/or therapy control of a patient with breast cancer.

[0066] The stratification of patients with breast cancer in new or established sub-groups of patients with breast cancer, and the appropriate selection of patient groups for the clinical development of new therapeutic agents is also included. The term “therapy control” also includes the allocation of patients to responders and non-responders regarding a therapy or the therapy course thereof.

[0067] In the sense of this invention, “diagnosis” means the positive determination of breast cancer by means of the breast cancer-specific marker sequences according to the invention as well as the assignment of the patients to breast cancer. The term diagnosis includes the medical diagnostics and examinations in this regard, in particular in-vitro diagnostics and laboratory diagnostics, and also proteomics and nucleic acid blotting. Further tests may be necessary to be sure and to exclude other diseases. The term diagnosis therefore also includes the differential diagnosis of breast cancer by means of the breast cancer-specific marker sequences according to the invention, and the prognosis of breast cancer, in particular the prediction of the risk of metastasis formation.

[0068] In the sense of this invention, “stratification or therapy control” means that, for example, the methods according to the invention allow decisions for the treatment and therapy of the patient, whether it is the hospitalisation of the patient, the use, efficacy and/or dosage of one or more drugs, a therapeutic measure or the monitoring of the course of a disease and the course of therapy or aetiology or classification of a disease, for example into a new or existing sub-type, or the differentiation of diseases and patients thereof.

[0069] In a further embodiment of the invention, the term “stratification” in particular includes the risk stratification with the prognosis of an “outcome” of a negative health event.

[0070] “Prognosis” means the prediction of the course of a disease, for example the prediction of the relapse-free survival, the overall survival, or the risk of metastasis formation.

[0071] Within the scope of this invention, the term “patient” is understood to mean any test subject (human or mammal), with the provision that the test subject is tested for breast cancer.

[0072] The term “breast cancer-specific marker sequence(s)” in the context of this invention means that that the nucleic acid, for example DNA, in particular cDNA or RNA or the coded amino acid sequence or the polypeptide or protein obtainable therefrom are significant (specific) for breast cancer. Breast cancer-specific marker sequences can be nucleic acid sequences and amino acid sequences, wherein modifications are also included.

[0073] The expressions “breast cancer-specific” and “for breast cancer” mean that, for example, the cDNA or the polypeptide or protein obtainable therefrom interacts with substances from the bodily fluid or tissue sample from a patient with breast cancer (for example antigen (epitope)/antibody (paratope) interaction). These substances from the bodily fluid or tissue sample either only occur or are only expressed, or occur or are expressed at least in an intensified manner, in the case of breast cancer, whereas these substances in patients or individuals without breast cancer are not present or are only present to a smaller extent (smaller quantity, lower concentration). On the other hand, breast cancer-specific marker sequences can also be characterised in that they interact with substances from the bodily fluid or tissue sample from patients with breast cancer because these substances no longer occur or are no longer expressed, or occur or are expressed at least in a much lower quantity/concentration, in the case of breast cancer, whereas these substances are present or are present at least to a much greater extent in patients or individuals without breast cancer. Breast cancer-specific marker sequences (marker sequences for breast cancer) may also be present in healthy test subjects, however the quantity (concentration) thereof changes for example with the development, establishment and therapy of breast cancer. The breast cancer-specific marker sequences are therefore biomarkers for breast cancer. The breast cancer-specific marker sequences may thus indicate a profile of substances from bodily fluid and tissue sampling, for example a breast cancer-associated autoantibody profile.

[0074] Autoantibody profiles comprise the quantity of one or more autoantibodies of which the occurrence/expression accompanies the development and/or establishment of breast cancer. “Breast cancer-associated autoantibody profiles” thus include on the one hand the composition (one or more autoantibodies) and on the other the quantity/concentration of individual autoantibodies.

[0075] In a particularly preferred embodiment of the invention, the breast cancer-specific marker sequence is an antigen or part of an antigen or codes for an antigen or for part of an antigen.

[0076] In a particularly preferred embodiment, the breast cancer-specific marker sequence identifies/binds to autoantibodies that are present (intensified) during the course of the development, establishment and therapy of breast cancer or are present to a smaller extent (or are no longer present) (referred to hereinafter as “breast cancer-associated autoantibodies”). Autoantibodies are formed by the body against the body's own antigens, which for example are produced when breast cancer is present. Autoantibodies are formed by the body against different substances and pathogens. Within the scope of the present invention, the breast cancer-associated autoantibodies in particular that are formed with the occurrence of and during the course of the development of breast cancer and/or of which the expression is upregulated or downregulated are detected. Breast cancer-associated autoantibodies can be detected with the aid of the method according to the invention and breast cancer-specific marker sequences and are therefore used as an indication for breast cancer. The detection and the monitoring of the quantity of breast cancer-associated autoantibodies in the patient can be used for the early detection, diagnosis and/or therapy monitoring/therapy control and for the prognosis and prediction of the risk of metastasis formation. These breast cancer-associated autoantibody profiles may be sufficiently characterised already with use of a breast cancer-specific marker sequence. In other cases, two or more breast cancer-specific marker sequences are necessary in order to indicate a breast cancer-associated autoantibody profile.

[0077] In preferred embodiments of the invention, the breast cancer-associated autoantibodies can be detected using breast cancer-specific marker sequences, which are derived from another individual, because they originate for example from a commercial cDNA bank. Preferred embodiments of the invention concern the breast cancer-associated marker sequences SEQ ID No. 1-491, SEQ ID. No. 492-982 and/or partial sequences of SEQ ID No. 1-982, and sequences that code for the proteins SEQ ID No. 983 to 1473 and/or partial sequences of these proteins.

[0078] In other preferred embodiments of the invention, the breast cancer-associated autoantibodies can be detected using breast cancer-specific marker sequences, which are derived from the same individual (autoantigen), because they originate for example from a cDNA bank produced especially for the patient or a group of patients (for example within the scope of personalised medicine). For example, homologues of the aforementioned breast cancer-specific marker sequences SEQ ID No. 1-1473 or partial sequences thereof are then used.

[0079] Autoantibodies can be formed by the patient already many years before the occurrence of the first symptoms of the disease. Early detection, diagnosis and also prognosis and (preventative) treatment would therefore be possible years before the visible outbreak of the disease. The devices and means (arrangement, array, protein array, diagnostic tool, test kit) and methods according to the invention thus enable a very early intervention compared with known methods, which considerably improves the prognosis and survival rates. Since the breast cancer-associated autoantibody profiles change during the establishment and treatment/therapy of breast cancer, the invention also enables the detection and the monitoring of breast cancer at any stage of development and treatment and also monitoring within the scope of aftercare in the case of breast cancer. The means according to the invention also allow easy handling at home by the patient themself and cost-effective routine precautionary measures for early detection and also aftercare.

[0080] In particular due to the use of antigens as specific marker sequence for breast cancer, which derive from sequences already known, for example from commercial cDNA banks, test subjects (individuals) can be tested, and, where applicable, breast cancer-associated autoantibodies present in these test subjects can be detected, even if the corresponding autoantigens are not (yet) known in these test subjects.

[0081] Different patients may have different breast cancer-associated autoantibody profiles, for example different cohorts or population groups differ from one another. Here, each patient may form one or more different breast cancer-associated autoantibodies during the course of the development of breast cancer and the progression of the disease of breast cancer, that is to say also different autoantibody profiles. In addition, the composition and/or the quantity of the formed breast cancer-associated autoantibodies may change during the course of the breast cancer development and progression of the disease, such that a quantitative evaluation is necessary. The therapy/treatment of breast cancer also leads to changes in the composition and/or the quantity of breast cancer-associated autoantibodies. The large selection of breast cancer-associated marker sequences according to the invention allows the individual compilation of breast cancer-specific marker sequences in an arrangement for individual patients, groups of patients, certain cohorts, population groups, and the like. In an individual case, the use of a breast cancer-specific marker sequence may therefore be sufficient, whereas in other cases at least two or more breast cancer-specific marker sequences have to be used together or in combination in order to produce a meaningful autoantibody profile.

[0082] Compared with other biomarkers, the detection of breast cancer-associated autoantibodies for example in the serum/plasma has the advantage of high stability and storage capability and good detectability. The presence of autoantibodies also is not subject to a circadian rhythm, and therefore the sampling is independent of the time of day, food intake and the like.

[0083] In addition, the breast cancer-associated autoantibodies can be detected with the aid of the corresponding antigens/autoantigens in known assays, such as ELISA or Western Blot, and the results can be checked for this.

[0084] In the sense of the invention, “wherein one or more breast cancer-specific marker sequence is/are selected” and “wherein one or more marker sequences for breast cancer is/are selected” means that an interaction is detected. Such an interaction is, for example, a bond, in particular a binding substance on at least one breast cancer-specific marker sequence, or, in the case that the breast cancer-specific marker sequence is a nucleic acid, for example a cDNA, the hybridisation with a suitable substance under selected conditions, in particular stringent conditions (for example as defined conventionally in J. Sambrook, E. F. Fritsch, T. Maniatis (1989), Molecular cloning: A laboratory manual, 2nd Edition, Cold Spring Habor Laboratory Press, Cold Spring Habor, USA oder Ausubel, “Current Protocols in Molecular Biology”, Green Publishing Associates and Wiley Interscience, N. Y. (1989)). One example of stringent hybridisation conditions is: hybridisation in 4×SSC at 65° C. (alternatively in 50% formamide and 4×SSC at 42° C.), followed by a number of washing steps in 0.1×SSC at 65° C. for a total of approximately one hour. An example of less stringent hybridisation conditions is hybridisation in 4×SSC at 37° C., followed by a number of washing steps in 1×SSC at room temperature.

[0085] The interaction between the bodily fluid or tissue sample from a patient and the breast cancer-specific marker sequences is preferably a protein-protein interaction.

[0086] In accordance with the invention, such substances, for example breast cancer-associated antigens, autoantigens, autoantibodies, are part of a bodily fluid, in particular blood, whole blood, blood plasma, blood serum, patient serum, urine, cerebrospinal fluid, synovial fluid or a tissue sample, for example from tumour tissue from the patient. The invention in particular relates to the use of these bodily fluids and tissue samples for early detection, diagnosis, prognosis, therapy control and aftercare.

[0087] However, in a further embodiment of the invention, the breast cancer-specific marker sequences or the substances identified from these marker sequences, for example breast cancer-associated autoantibodies, can be present in a significantly higher or lower expression rate or concentration, which is indicative of breast cancer. Here, the relative expression rates diseased/healthy of the marker sequences according to the invention for breast cancer or the substances identified from these marker sequences are determined by means of proteomics or nucleic acid blots.

[0088] The breast cancer-specific marker sequences, in a further embodiment of the invention, have a recognition signal that is addressed to the substance to be bound (for example antibody, nucleic acid). In accordance with the invention, the recognition signal for a protein is preferably an epitope and/or paratope and/or hapten, and for a cDNA is preferably a hybridisation or binding region.

[0089] The breast cancer-specific marker sequences according to the invention are detailed in Table A (RNA) and in the sequence protocol and can also be clearly identified by the respectively cited database entry (also accessible by Internet: http://www.ncbi.nlm.nih.gov/) (by means of accession no.); see also the associated sequence protocol. The clone sequences (cDNA) and protein sequences can be found in the accompanying sequence protocol.

[0090] The invention therefore also concerns the full-length sequences of the breast cancer-specific marker sequences according to the invention, more specifically as defined via the known database entry according to Table A, referred to hereinafter as SEQ 1-1473.

[0091] Furthermore, analogue embodiments to the breast cancer-specific marker sequences SEQ 1-1473, for example as presented in the claims, are therefore also included, since the SEQ 1-1473 according to the invention in turn constitute partial sequences, at least with high homology. However, the breast cancer-specific marker sequences SEQ 1-1473 are preferred in accordance with the invention.

[0092] In accordance with the invention, the marker sequences also comprise modifications of the nucleic acid sequence, in particular cDNA sequence and the corresponding amino acid sequence, such as chemical modification, such as citrullination, acetylation, phosphorylation, glycosylation or polyA strand and further modifications known as appropriate to a person skilled in the art.

[0093] The invention also relates to homologues of the breast cancer-specific marker sequences and partial sequences, for example fragments of breast cancer-specific marker sequences.

[0094] For example, homologues are nucleic acid sequences and/or protein sequences, for example homologues of SEQ ID No. 1-1473, in particular homologues of SEQ ID No. 1-491 and SEQ ID No. 492-982 that have an identity with the breast cancer-specific marker sequences of at least 70% or 80%, preferably 90% or 95%, particularly preferably 96% or 97% or more, for example 98% or 99%. In a particularly preferred embodiment of the invention, for the case in which the breast cancer-specific marker sequences are antigens, the homology in the sequence range in which the antigen-antibody or antigen-autoantibody interaction takes place, is at least 95%, preferably at least 97%, particularly preferably at least 99%. For example, mutations such as base exchange mutations, frameshift mutations, base insertion mutations, base loss mutations, point mutations and insertion mutations, are included in accordance with the invention.

[0095] The invention also relates to partial sequences of the breast cancer-specific marker sequences. Partial sequences also include fragments of the marker sequences according to the invention, and partial sequences are nucleic acids or proteins/peptides that are shortened compared with the entire nucleic acid or the entire protein/peptide. Here, the deletion may occur at the end or the ends and/or within the sequence. For example, partial sequences and/or fragments that have 50 to 100 nucleotides or 70-120 nucleotides of an entire sequence are included, for example of SEQ 1-1473. Homologues of partial sequences and fragments are also included in accordance with the invention. In a particular embodiment, the breast cancer-specific marker sequences are shortened compared with the sequences 1-1473 to such an extent that they still consist only of the binding point(s) for the breast cancer-associated autoantibody in question. In accordance with the invention, breast cancer-specific marker sequences are also included that differ from the sequences SEQ ID No. 1-1473 in that they contain one or more insertions, wherein the insertions for example are 1 to 100 or more nucleotide/amino acids long, preferably 5 to 50, particularly preferably 10 to 20 nucleotides/amino acids long and the sequences are otherwise identical however or homologous to sequences 1-1473. Partial sequences that have at least 90%, preferably at least 95%, particularly preferably 97% or 98%, of the length of the breast cancer-specific marker sequences according to the invention, SEQ IS No. 1-491, SEQ ID No. 492-982, SEQ ID No. 983-1473, are particularly preferred.

[0096] In a further embodiment, the respective breast cancer-specific marker sequence can be represented in different quantities in one or more regions in the arrangement. This allows a variation of the sensitivity. The regions may each have a totality of breast cancer-specific marker sequences, that is to say a sufficient number of different breast cancer-specific marker sequences, in particular 2, 3, 4, 5, 6, 7, 8, 9 or 10 or more different and where applicable further nucleic acids and/or proteins, in particular biomarkers.

[0097] In a particularly preferred embodiment of the invention, at least 96 to 25,000 (numerically) or more different or same breast cancer-specific marker sequences and optionally further nucleic acids and/or proteins, in particular biomarkers, are represented on the support. Further preferably, more than 2,500, particularly preferably 10,000 or more, different or same breast cancer-specific marker sequences and optionally further nucleic acids and/or proteins, in particular biomarkers, are represented on the support.

[0098] Within the scope of this invention, “arrangement” is synonymous with “array”, and, if this “array” is used to identify substances on breast cancer-specific marker sequences, this is to be understood preferably to be an “assay” or a diagnostic device. In a preferred embodiment, the arrangement is designed such that the breast cancer-specific marker sequences represented on the arrangement are present in the form of a grid on a support. Furthermore, those arrangements are preferred that permit a high-density arrangement of breast cancer-specific marker sequences, for example protein binders. The breast cancer-specific marker sequences are preferably spotted. Such high-density spotted arrangements are disclosed for example in WO 99/57311 and WO 99/57312 and can be used advantageously in a robot-supported automated high-throughput method.

[0099] Within the scope of this invention, however, the term “assay” or diagnostic device likewise comprises those embodiments of a device such as ELISA, bead-based assay, line assay, Western Blot, and immunochromatographic methods (for example what are known as lateral flow immunoassays) or similar immunological single or multiplex detection methods.

[0100] A “protein array” in the sense of this invention is the systematic arrangement of breast cancer-specific marker sequences on a solid support, wherein the breast cancer-specific marker sequences are proteins or peptides or parts thereof, and wherein the support is preferably a solid support.

[0101] The breast cancer-specific marker sequences of the arrangement are fixed on a solid support, but are preferably spotted or immobilised or even printed on, that is to say applied in a reproducible manner. One or more breast cancer-specific marker sequences can be present multiple times in the totality of all breast cancer-specific marker sequences and may be present in different quantities based on a spot. Furthermore, the breast cancer-specific marker sequences can be standardised on the solid support (for example by means of serial dilution series of, for example, human globulins as internal calibrators for data normalisation and quantitative evaluation). A standard (for example a gold standard) can also be applied to the support where necessary.

[0102] In a further embodiment, the breast cancer-specific marker sequences are present as clones. Such clones can be obtained for example by means of a cDNA expression library according to the invention (Büssow et al. 1998 (above)). In a preferred embodiment, such expression libraries containing clones are obtained using expression vectors from a cDNA expression library consisting of the cDNA marker sequences. These expression vectors preferably contain inducible promoters. The induction of the expression can be carried out for example by means of an inducer, such as IPTG. Suitable expression vectors are described in Terpe et al. (Terpe T Appl Microbiol Biotechnol. 2003 January; 60(5):523-33).

[0103] Expression libraries are known to a person skilled in the art; they can be produced in accordance with standard works, such as Sambrook et al, “Molecular Cloning, A laboratory handbook, 2nd edition (1989), CSH press, Cold Spring Harbor, N.Y. Expression libraries that are tissue-specific (for example human tissue, in particular human organs, for example from breast tissue or tissue from breast carcinoma) are furthermore preferable. Further, expression libraries that can be obtained by means of exon-trapping are also included in accordance with the invention. Instead of the term expression library, reference may also be made synonymously to an expression bank.

[0104] Protein arrays or corresponding expression libraries that do not exhibit any redundancy (what is known as a Uniclone® library) and that can be produced for example in accordance with the teaching of WO 99/57311 and WO 99/57312 are furthermore preferred. These preferred Uniclone® libraries have a high proportion of non-defective fully expressed proteins of a cDNA expression library.

[0105] Within the scope of this invention, the clones can also be, but are not limited to, transformed bacteria, recombinant phages or transformed cells of mammals, insects, fungi, yeasts or plants.

[0106] The clones are fixed, spotted or immobilised on a solid support. The invention therefore relates to an arrangement/use, wherein the breast cancer-specific marker sequences are present as clones.

[0107] In addition, the breast cancer-specific marker sequences can be present in the respective form in the form of a fusion protein, which for example contains at least one affinity epitope or “tag”. The tag may be or may contain one such as c-myc, his tag, arg tag, FLAG, alkaline phosphatase, V5 tag, T7 tag or strep tag, HAT tag, NusA, S tag, SBP tag, thioredoxin, DsbA, a fusion protein, preferably a cellulose-binding domain, green fluorescent protein, maltose-binding protein, calmodulin-binding protein, glutathione S-transferase or lacZ.

[0108] In a further preferred embodiment of the arrangement/use according to the invention, this corresponds to a grid with the dimensions of a microtiter plate (8-12 well strips, 96 wells, 384 wells or more), a silicon wafer, a chip, a mass spectrometry target or a matrix.

[0109] In a further embodiment, the invention relates to an assay or protein array for identifying and characterising a substance (for example also referred to as a hit, lead substance, candidate, active agent) for breast cancer, characterised in that an arrangement or assay according to the invention

a.) is brought into contact with at least one substance to be tested, and
b.) binding success is detected.

[0110] The substance to be tested may be any native or non-native biomolecule, a (synthetic) chemical molecule, a natural substance, a mixture or a substance library.

[0111] Once the substance to be tested has contacted a breast cancer-specific marker sequence, the binding success is evaluated, and is performed for example with use of commercially available image analysing software (GenePix Pro (Axon Laboratories), Aida (Raytest), ScanArray (Packard Bioscience).

[0112] Binding according to the invention, binding success, interactions, for example protein-protein interactions (for example protein to breast cancer-specific marker sequence, such as antigen/antibody) or corresponding “means for detecting the binding success” can be visualised for example by means of fluorescence labelling, biotinylation, radio-isotope labelling or colloid gold or latex particle labelling in the conventional manner. Bound antibodies are detected with the aid of secondary antibodies, which are labelled using commercially available reporter molecules (for example Cy, Alexa, Dyomics, FITC or similar fluorescent dyes, colloidal gold or latex particles), or with reporter enzymes, such as alkaline phosphatase, horseradish peroxidase, etc. and the corresponding colorimetric, fluorescent or chemoluminescent substrates. A readout is performed for example by means of a microarray laser scanner, a CCD camera or visually.

[0113] In a further embodiment, the invention relates to a drug/active agent or prodrug for breast cancer developed and obtainable by the use of a breast cancer-specific marker sequence according to the invention, an arrangement according to the invention, a use according to the invention, or an assay according to the invention.

[0114] The invention also relates to the use of a breast cancer-specific marker sequence selected from sequences SEQ ID No. 1- to 1473 and partial sequences of SEQ ID. No. 1-1473 with at least 90%, preferably at least 95%, of the length of SEQ ID No. 1-1473, and homologues of SEQ ID No. 1-1473 and partial sequences thereof with an identity of at least 95%, preferably at least 98% or more, to the corresponding sequences and proteins/peptides coded by the sequences SEQ ID No. 1-491, coded by the partial sequences thereof and homologues as affinity material for carrying out an apheresis or blood washing for patients with breast cancer. The invention thus relates to the use of the marker sequences according to the invention, preferably in the form of an arrangement, as affinity material for carrying out a blood washing in the broader sense, wherein substances from bodily fluids from a patient with breast cancer, such as blood or plasma, bind to the marker sequences according to the invention and consequently can be removed selectively from the bodily fluid.

[0115] The following examples explain the invention, but do not limit the invention to the examples.

[0116] The examples were carried out with use of the UNIarray technology platform on the basis of quantitative analyses of the autoantibody profiles in the serum of female patients with breast cancer. Breast cancer-associated antigens and breast cancer-associated autoantigens (biomarkers), which enable an early detection of breast cancer and/or indicate a specific form of progression (prognostic relevance), are thus to be identified systematically.

### EXAMPLE 1

[0117] Candidates for breast cancer-specific marker sequences were identified first.

[0118] In the first phase, 50 serum samples are tested for this purpose from female patients with breast carcinoma on a MACROarray (comprises approximately 10,000 different recombinant human proteins). Here, candidates for breast cancer-specific marker sequences are identified.

### EXAMPLE 2

[0119] In the subsequent test phase, these candidates for breast cancer-specific marker sequences are analysed comparatively on serum samples from 100 female patients with breast cancer and 100 female patients with benign changes of the breast or 100 healthy control female patients and characterised. As a result of this comparative analysis, marker sequences are primarily identified that interact with breast cancer-associated autoantibodies.

### EXAMPLE 3

[0120] Particularly significant biomarkers (breast cancer-specific marker sequences) are selected by means of bioinformatic analysis. The candidates for breast cancer-specific marker sequences are evaluated in terms of whether they discriminate between different test subjects (for example healthy/unhealthy)/patient groups (for example low/high risk of metastasis formation)/cohorts (for example certain past histories).

[0121] To this end, the marker sequence candidates are applied to a protein array and validated. The data evaluation is performed via statistical analyses, for example threshold value analysis, support vector machine algorithm (SVM). The sample consumption for the validation is just 50 μl/sample. In a first approach, cohorts of category I and II are selected in this way.

[0122] The protein array obtained is specific for breast cancer. This protein array comprises one or more breast cancer-specific marker sequences and identifies breast cancer-associated autoantibodies.

[0123] Cohort I: clinical finding: breast cancer-positive group (CASE group; verified via histopathological finding of the biopsy).

[0124] Cohort II: clinical finding: breast cancer-negative group (control group), age-matched.

[0125] Female patients are selected in accordance with inclusion and exclusion criteria

### Inclusion Criteria

[0126] histologically verified breast carcinoma
[0127] histologically verified non-neoplastic change
[0128] healthy age-matched control
[0129] at the moment of diagnosis (prior to operation)
[0130] prior to or during neoadjuvant and adjuvant anti-oestrogen therapy, adjuvant chemotherapy or adjuvant aromatase inhibitor therapy.

### Exclusion Criteria

[0131] age below 18 years
[0132] tumour treatment already administered

[0133] Corresponding protein arrays are developed for diagnosis, prediction of the course of therapy and prediction of metastasis formation.

### EXAMPLE 4

[0134] For the development of a protein array for the diagnosis of breast cancer, the results of the autoantibody analysis are compared with the golden standard of diagnosis and the identified marker sequences are validated (breast cancer-specific marker sequences; marker sequences for breast cancer). The results are then correlated with other clinical characteristics of breast cancer, for example tumour size and malignancy.

### EXAMPLE 5

[0135] With the development of a protein array for prediction of the course of therapy, a certain autoantibody profile or a certain signal of the protein array is correlated with the response of the breast cancer to a certain therapy. In addition, changes of the autoantibody profile are validated, even with regard to different treatment options (continuous time modelling).

### EXAMPLE 6

[0136] With the development of a protein array for the prediction of metastasis formation, breast cancer-specific marker sequences are selected that interact with breast cancer-associated autoantibodies that are suitable as indicators for metastasis formation. Due to the comparison of autoantibodies at the moment of diagnosis of female patients with and without metastasis formation, female patients who have a high metastasis risk can be identified.

[0137] Within the scope of the identification and validation of breast cancer-specific marker sequences, bioinformatic analyses can be performed. For each serum, reactivities against approximately 2,000 different antigens can be measured for this purpose by means of microarray. This data is used for a ranking of the spotted antigens with respect to their differentiation capability between healthy and diseased sera. This evaluation can be performed by means of the non-parametric Mann-Whitney test on normalised intensity data. For normalisation, an internal standard is used that is also spotted on each protein array. Since a p-value is calculated for each antigen, methods for correction of multiple testing are used. As a very conservative approach, a Bonferroni correction is performed and in addition the less restrictive False Discovery Rate (FDR) in accordance with Benjamini & Hochberg is calculated.

[0138] Furthermore, the data is used for classification of the sera. Here, different multivariate methods are used. These are methods from the statistical learning methods, such as Support Vector Machines (SVM), neuronal networks or classification trees, and a threshold value method, which is suitable both for classification and for visual representation of the data.

[0139] To avoid overfitting, a 10× cross-validation of the data is performed by way of example.

[0140] The sequences according to the invention are specified in the accompanying sequence protocol. (The clone sequences (cDNA) SEQ ID No. 1-491, the RNA sequences SEQ ID. No. 492-982 and the protein sequences SEQ ID No. 983-1473).

TABLE A
Data concerning breast cancer-specific marker
sequences (RNA) SEQ ID No. 492-982.

| SEQ | | Alias | |
|---|---|---|---|
| ID | Accession | Accession | |
| No. | No. | No. | Blast |
| 492 | gi\|261337182 | NM_182905.4 | WAS protein family homolog 1 |
| | | | [Homo sapiens] |
| 493 | gi\|16877437 | BC016965.1 | NLRP1 protein [Homo sapiens] |
| 494 | gi\|57242760 | NM_003804.3 | receptor-interacting |
| | | | serine/threonine-protein |
| | | | kinase 1 [Homo sapiens] |
| 495 | gi\|225579068 | NM_012426.4 | splicing factor 3B subunit 3 |
| | | | [Homo sapiens] |
| 496 | gi\|221136896 | NM_014786.3 | rho guanine nucleotide |
| | | | exchange factor 17 |
| | | | [Homo sapiens] |
| 497 | gi\|60218896 | NM_005748.3 | YY1-associated factor 2 |
| | | | isoform 2 [Homo sapiens] |
| 498 | gi\|157388905 | NM_017806.2 | lck-interacting transmembrane |
| | | | adapter 1 [Homo sapiens] |
| 499 | gi\|13569955 | NM_030978.1 | actin-related protein 2/3 |
| | | | complex subunit 5-like protein |
| | | | [Homo sapiens] |
| 500 | gi\|17933771 | NM_080388.1 | protein S100-A16 |
| | | | [Homo sapiens] |
| 501 | gi\|171906614 | NM_006891.3 | gamma-crystallin D |
| | | | [Homo sapiens] |
| 502 | gi\|157389013 | NM_001408.2 | cadherin EGF LAG seven-pass G- |
| | | | type receptor 2 precursor |
| | | | [Homo sapiens] |
| 503 | gi\|55956909 | NM_002430.2 | probable tumor suppressor |
| | | | protein MN1 [Homo sapiens] |
| 504 | gi\|21396481 | NM_003512.3 | histone H2A type 1-C |
| | | | [Homo sapiens] |
| 505 | gi\|77812677 | NM_006903.4 | inorganic pyrophosphatase 2, |
| | | | mitochondrial isoform 2 |
| | | | precursor [Homo sapiens] |
| 506 | gi\|41349492 | NM_013239.3 | serine/threonine-protein |
| | | | phosphatase 2A regulatory |
| | | | subunit B″ subunit beta |
| | | | [Homo sapiens] |
| 507 | gi\|56118233 | NM_181716.2 | centromere protein V |
| | | | [Homo sapiens] |
| 508 | gi\|225579128 | NM_001018024.2 | mature T-cell proliferation 1 |
| | | | neighbor protein |
| | | | [Homo sapiens] |
| 509 | gi\|334085246 | NM_014889.3 | presequence protease, |
| | | | mitochondrial isoform 2 |
| | | | precursor [Homo sapiens] |
| 510 | gi\|66932989 | NM_001018078.1 | folylpolyglutamate synthase, |
| | | | mitochondrial isoform b |
| | | | [Homo sapiens] |
| 511 | gi\|31317296 | NM_181353.1 | DNA-binding protein inhibitor |
| | | | ID-1 isoform b [Homo sapiens] |
| 512 | gi\|209413724 | NM_003692.3 | tomoregulin-1 precursor |
| | | | [Homo sapiens] |
| 513 | gi\|37181353 | AY358124.1 | SEMA5B [Homo sapiens] |
| 514 | gi\|21704284 | NM_021219.2 | junctional adhesion molecule B |
| | | | precursor [Homo sapiens] |
| 515 | gi\|254028259 | NM_182501.3 | mTERF domain-containing |
| | | | protein 2 [Homo sapiens] |
| 516 | gi\|161016768 | NM_001799.3 | cyclin-dependent kinase 7 |
| | | | [Homo sapiens] |
| 517 | gi\|180636 | M93008.1 | L-isoaspartyl/D-aspartyl |
| | | | protein carboxyl |
| | | | methyltransferase |
| | | | [Homo sapiens] |
| 518 | gi\|67782361 | NM_019030.2 | ATP-dependent RNA helicase |
| | | | DHX29 [Homo sapiens] |
| 519 | gi\|14195613 | NM_018940.2 | protocadherin beta-7 precursor |
| | | | [Homo sapiens] |
| 520 | gi\|93204870 | NM_021229.3 | netrin-4 precursor |
| | | | [Homo sapiens] |
| 521 | gi\|224967099 | NM_001734.3 | complement C1s subcomponent |
| | | | precursor [Homo sapiens] |
| 522 | gi\|16507949 | NM_014466.2 | tektin-2 [Homo sapiens] |
| 523 | gi\|75750475 | NM_001033566.1 | mitochondrial Rho GTPase 1 |
| | | | isoform 2 [Homo sapiens] |
| 524 | gi\|216548626 | NM_001142467.1 | transcription factor HES-4 |
| | | | isoform 1 [Homo sapiens] |
| 525 | gi\|38683798 | NM_033121.1 | ankyrin repeat domain- |
| | | | containing protein 13A |
| | | | [Homo sapiens] |
| 526 | gi\|285002230 | NM_001083112.2 | glycerol-3-phosphate |
| | | | dehydrogenase, mitochondrial |
| | | | precursor [Homo sapiens] |
| 527 | gi\|5454057 | NM_006278.1 | CMP-N-acetylneuraminate-beta- |
| | | | galactosamide-alpha-2,3- |
| | | | sialyltransferase 4 |
| | | | [Homo sapiens] |
| 528 | gi\|169259774 | NM_014737.2 | ras association domain- |
| | | | containing protein 2 |
| | | | [Homo sapiens] |
| 529 | gi\|126091094 | NM_001081563.1 | myotonin-protein kinase |
| | | | isoform 1 [Homo sapiens] |
| 530 | gi\|194097397 | NM_002841.3 | receptor-type tyrosine-protein |
| | | | phosphatase gamma precursor |
| | | | [Homo sapiens] |
| 531 | gi\|41350325 | NM_003791.2 | membrane-bound transcription |
| | | | factor site-1 protease |
| | | | preproprotein [Homo sapiens] |
| 532 | gi\|84508630 | NM_024419.3 | CDP-diacylglycerol--glycerol- |
| | | | 3-phosphate 3- |
| | | | phosphatidyltransferase, |
| | | | mitochondrial precursor |
| | | | [Homo sapiens] |
| 533 | gi\|187960072 | NM_006341.3 | mitotic spindle assembly |
| | | | checkpoint protein MAD2B |
| | | | [Homo sapiens] |
| 534 | gi\|76563938 | NM_015920.3 | 40S ribosomal protein S27-like |
| | | | [Homo sapiens] |
| 535 | gi\|169234806 | NM_015401.3 | histone deacetylase 7 isoform |
| | | | a [Homo sapiens] |
| 536 | gi\|120952828 | NM_001079906.1 | zinc finger protein 331 |
| | | | [Homo sapiens] |
| 537 | gi\|57222569 | NM_138477.2 | codanin-1 [Homo sapiens] |
| 538 | gi\|21361096 | NM_004125.2 | DNAJC25-GNG10 protein |
| | | | [Homo sapiens] |
| 539 | gi\|51093843 | NM_004147.3 | developmentally-regulated GTP- |
| | | | binding protein 1 |
| | | | [Homo sapiens] |
| 540 | gi\|221316745 | NM_003156.3 | stromal interaction molecule 1 |
| | | | precursor [Homo sapiens] |
| 541 | gi\|327365362 | NM_203290.2 | DNA-directed RNA polymerases I |
| | | | and III subunit RPAC1 |
| | | | [Homo sapiens] |
| 542 | gi\|114520590 | NM_032985.4 | protein transport protein |
| | | | Sec23B isoform 1 |
| | | | [Homo sapiens] |
| 543 | gi\|194018465 | NM_004454.2 | ETS translocation variant 5 |
| | | | [Homo sapiens] |
| 544 | gi\|62953137 | NM_002192.2 | inhibin beta A chain precursor |
| | | | [Homo sapiens] |
| 545 | gi\|31652260 | NM_002466.2 | myb-related protein B |
| | | | [Homo sapiens] |
| 546 | gi\|85680425 | DQ335454.1 | BS69 variant 3 [Homo sapiens] |
| 547 | gi\|218563704 | NM_025193.3 | 3 beta-hydroxysteroid |
| | | | dehydrogenase type 7 isoform a |
| | | | [Homo sapiens] |
| 548 | gi\|164419759 | NM_000107.2 | DNA damage-binding protein 2 |
| | | | [Homo sapiens] |
| 549 | gi\|114155138 | NM_153649.3 | tropomyosin alpha-3 chain |
| | | | isoform 2 [Homo sapiens] |
| 550 | gi\|215820618 | NM_014699.3 | zinc finger protein 646 |
| | | | [Homo sapiens] |
| 551 | gi\|157502196 | NM_014738.4 | hypothetical protein LOC9772 |
| | | | [Homo sapiens] |
| 552 | gi\|58331162 | NM_001009936.1 | PHD finger protein 19 isoform |
| | | | b [Homo sapiens] |
| 553 | gi\|110611232 | NM_130445.2 | collagen alpha-1(XVIII) chain |
| | | | isoform 2 precursor |
| | | | [Homo sapiens] |
| 554 | gi\|23110958 | NM_000396.2 | cathepsin K preproprotein |
| | | | [Homo sapiens] |
| 555 | gi\|150417970 | NM_003174.3 | supervillin isoform 1 |
| | | | [Homo sapiens] |
| 556 | gi\|84872172 | NM_003432.1 | zinc finger protein 131 |
| | | | [Homo sapiens] |
| 557 | gi\|54792739 | NM_014858.2 | transmembrane and coiled-coil |
| | | | domains protein 2 isoform 1 |
| | | | [Homo sapiens] |
| 558 | gi\|14589877 | NM_005864.2 | embryonal Fyn-associated |
| | | | substrate isoform 1 |
| | | | [Homo sapiens] |
| 559 | gi\|148529010 | NM_006091.3 | coronin-2B isoform 1 |
| | | | [Homo sapiens] |
| 560 | gi\|51317348 | NM_001003789.1 | rab-like protein 2B isoform 1 |
| | | | [Homo sapiens] |
| 561 | gi\|119120893 | NM_015263.2 | dmX-like protein 2 isoform 2 |
| | | | [Homo sapiens] |
| 562 | gi\|213972618 | NM_001141973.1 | probable cation-transporting |
| | | | ATPase 13A2 isoform 2 |
| | | | [Homo sapiens] |
| 563 | gi\|283135239 | NM_020155.3 | integral membrane protein |
| | | | GPR137 isoform 3 |
| | | | [Homo sapiens] |
| 564 | gi\|164565439 | NM_024571.3 | U11/U12 small nuclear |
| | | | ribonucleoprotein 25 kDa |
| | | | protein [Homo sapiens] |
| 565 | gi\|45331214 | NM_032429.1 | leucine zipper putative tumor |
| | | | suppressor 2 [Homo sapiens] |
| 566 | gi\|94721260 | NM_033133.4 | 2′,3′-cyclic-nucleotide 3′- |
| | | | phosphodiesterase |
| | | | [Homo sapiens] |
| 567 | gi\|115511050 | NM_002095.4 | transcription initiation |
| | | | factor IIE subunit beta |
| | | | [Homo sapiens] |
| 568 | gi\|156616274 | NM_002691.2 | DNA polymerase delta catalytic |
| | | | subunit [Homo sapiens] |
| 569 | gi\|38146093 | NM_005481.2 | mediator of RNA polymerase II |
| | | | transcription subunit 16 |
| | | | [Homo sapiens] |
| 570 | gi\|45597176 | NM_015043.3 | TBC1 domain family member 9B |
| | | | isoform b [Homo sapiens] |
| 571 | gi\|23238252 | NM_004377.2 | carnitine O- |
| | | | palmitoyltransferase 1, muscle |
| | | | isoform isoform a |
| | | | [Homo sapiens] |
| 572 | gi\|98986448 | NM_000496.2 | beta-crystallin B2 |
| | | | [Homo sapiens] |
| 573 | gi\|4505784 | NM_000294.1 | phosphorylase b kinase gamma |
| | | | catalytic chain, testis/liver |
| | | | isoform isoform 1 |
| | | | [Homo sapiens] |
| 574 | gi\|78482607 | NM_021129.3 | inorganic pyrophosphatase |
| | | | [Homo sapiens] |
| 575 | gi\|18027315 | AF289556.1 | unknown [Homo sapiens] |
| 576 | gi\|55770885 | NM_006537.2 | ubiquitin carboxyl-terminal |
| | | | hydrolase 3 [Homo sapiens] |
| 577 | gi\|59710102 | NM_006315.4 | polycomb group RING finger |
| | | | protein 3 [Homo sapiens] |
| 578 | gi\|2224666 | AB002361.1 | KIAA0363 [Homo sapiens] |
| 579 | gi\|33356549 | NM_182679.1 | G patch domain-containing |
| | | | protein 4 isoform 2 |
| | | | [Homo sapiens] |
| 580 | gi\|210147473 | NM_022366.2 | dimethyladenosine transferase |
| | | | 2, mitochondrial |
| | | | [Homo sapiens] |
| 581 | gi\|50346003 | NM_002626.4 | 6-phosphofructokinase, liver |
| | | | type [Homo sapiens] |
| 582 | gi\|187828433 | NM_006224.3 | phosphatidylinositol transfer |
| | | | protein alpha isoform |
| | | | [Homo sapiens] |
| 583 | gi\|53749664 | NM_005654.4 | COUP transcription factor 1 |
| | | | [Homo sapiens] |
| 584 | gi\|34485712 | NM_004663.3 | ras-related protein Rab-11A |
| | | | isoform 1 [Homo sapiens] |
| 585 | gi\|150378438 | NM_020226.3 | PR domain zinc finger protein |
| | | | 8 [Homo sapiens] |
| 586 | gi\|52694663 | NM_020799.2 | AMSH-like protease |
| | | | [Homo sapiens] |
| 587 | gi\|169646771 | NM_002064.2 | glutaredoxin-1 [Homo sapiens] |
| 588 | gi\|209969817 | NM_001540.3 | heat shock protein beta-1 |
| | | | [Homo sapiens] |
| 589 | gi\|164664491 | NM_007103.3 | NADH dehydrogenase |
| | | | [ubiquinone] flavoprotein 1, |
| | | | mitochondrial isoform 1 |
| | | | precursor [Homo sapiens] |
| 590 | gi\|48255923 | NM_021075.3 | NADH dehydrogenase |
| | | | [ubiquinone] flavoprotein 3, |
| | | | mitochondrial isoform a |
| | | | precursor [Homo sapiens] |
| 591 | gi\|8923891 | NM_018663.1 | peroxisomal membrane protein 2 |
| | | | [Homo sapiens] |
| 592 | gi\|117553583 | NM_001077523.1 | AP-3 complex subunit delta-1 |
| | | | isoform 1 [Homo sapiens] |
| 593 | gi\|119393885 | NM_014706.3 | squamous cell carcinoma |
| | | | antigen recognized by T-cells |
| | | | 3 [Homo sapiens] |
| 594 | gi\|26787964 | NM_006411.2 | 1-acyl-sn-glycerol-3-phosphate |
| | | | acyltransferase alpha |
| | | | [Homo sapiens] |
| 595 | gi\|10947033 | NM_006454.2 | max dimerization protein 4 |
| | | | [Homo sapiens] |
| 596 | gi\|187960089 | NM_015327.2 | protein SMG5 [Homo sapiens] |
| 597 | gi\|141801721 | NM_015153.2 | PHD finger protein 3 |
| | | | [Homo sapiens] |
| 598 | gi\|187761372 | NM_005744.3 | E3 ubiquitin-protein ligase |
| | | | ARIH1 [Homo sapiens] |
| 599 | gi\|102467483 | NM_017751.2 | sphingomyelin |
| | | | phosphodiesterase 4 isoform 1 |
| | | | [Homo sapiens] |
| 600 | gi\|31543086 | NM_020147.2 | THAP domain-containing protein |
| | | | 10 [Homo sapiens] |
| 601 | gi\|214010239 | NM_001142292.1 | VIP36-like protein isoform 1 |
| | | | [Homo sapiens] |
| 602 | gi\|42476160 | NM_032902.5 | protein phosphatase 1 |
| | | | regulatory subunit 16A |
| | | | [Homo sapiens] |
| 603 | gi\|333609250 | NM_001005850.2 | zinc finger protein 835 |
| | | | [Homo sapiens] |
| 604 | gi\|189011564 | NM_000038.4 | adenomatous polyposis coli |
| | | | protein isoform b |
| | | | [Homo sapiens] |
| 605 | gi\|87578391 | NM_031845.2 | microtubule-associated protein |
| | | | 2 isoform 2 [Homo sapiens] |
| 606 | gi\|19913344 | NM_006527.2 | histone RNA hairpin-binding |
| | | | protein [Homo sapiens] |
| 607 | gi\|110225356 | NM_006819.2 | stress-induced-phosphoprotein |
| | | | 1 [Homo sapiens] |
| 608 | gi\|42544225 | NM_020857.2 | vacuolar protein sorting- |
| | | | associated protein 18 homolog |
| | | | [Homo sapiens] |
| 609 | gi\|166795298 | NM_006516.2 | solute carrier family 2, |
| | | | facilitated glucose |
| | | | transporter member 1 |
| | | | [Homo sapiens] |
| 610 | gi\|211904132 | NM_014764.3 | DAZ-associated protein 2 |
| | | | isoform a [Homo sapiens] |
| 611 | gi\|148612828 | NM_001098509.1 | small G protein signaling |
| | | | modulator 2 isoform 2 |
| | | | [Homo sapiens] |
| 612 | gi\|40018634 | NM_015440.3 | monofunctional C1- |
| | | | tetrahydrofolate synthase, |
| | | | mitochondrial isoform 2 |
| | | | precursor [Homo sapiens] |
| 613 | gi\|169234785 | NM_017991.4 | hypothetical protein LOC55683 |
| | | | isoform b [Homo sapiens] |
| 614 | gi\|70778868 | NM_021933.2 | migration and invasion- |
| | | | inhibitory protein |
| | | | [Homo sapiens] |
| 615 | gi\|113204623 | NM_032193.3 | ribonuclease H2 subunit C |
| | | | [Homo sapiens] |
| 616 | gi\|65301131 | NM_138338.2 | DNA-directed RNA polymerase |
| | | | III subunit RPC8 isoform a |
| | | | [Homo sapiens] |
| 617 | gi\|221219069 | NM_145295.3 | zinc finger protein 627 |
| | | | [Homo sapiens] |
| 618 | gi\|21264342 | NM_002967.2 | scaffold attachment factor B1 |
| | | | isoform 3 [Homo sapiens] |
| 619 | gi\|197085592 | NM_006328.3 | RNA-binding protein 14 isoform |
| | | | 1 [Homo sapiens] |
| 620 | gi\|149588533 | NM_001098833.1 | ataxin-7-like protein 3 |
| | | | isoform b [Homo sapiens] |
| 621 | gi\|20270356 | NM_138802.1 | AN1-type zinc finger protein |
| | | | 2B [Homo sapiens] |
| 622 | gi\|35493700 | NM_152564.3 | vacuolar protein sorting- |
| | | | associated protein 13B isoform |
| | | | 1 [Homo sapiens] |
| 623 | gi\|142385096 | NM_001077693.2 | endothelial cell-specific |
| | | | chemotaxis regulator precursor |
| | | | [Homo sapiens] |
| 624 | gi\|71773207 | NM_000683.3 | alpha-2C adrenergic receptor |
| | | | [Homo sapiens] |
| 625 | gi\|55925575 | NM_000597.2 | insulin-like growth factor- |
| | | | binding protein 2 precursor |
| | | | [Homo sapiens] |
| 626 | gi\|71772582 | NM_001030001.1 | 40S ribosomal protein S29 |
| | | | isoform 2 [Homo sapiens] |
| 627 | gi\|18105053 | NM_014970.2 | kinesin-associated protein 3 |
| | | | isoform 1 [Homo sapiens] |
| 628 | gi\|34147578 | NM_0114338.3 | phosphatidylserine |
| | | | decarboxylase proenzyme |
| | | | [Homo sapiens] |
| 629 | gi\|12060856 | AF308303.1 | serologically defined breast |
| | | | cancer antigen NY-BR-99 |
| | | | [Homo sapiens] |
| 630 | gi\|7020624 | AK000496.1 | unnamed protein product |
| | | | [Homo sapiens] |
| 631 | gi\|209571529 | NM_182527.2 | calcium-binding protein 7 |
| | | | [Homo sapiens] |
| 632 | gi\|56090145 | NM_001005920.2 | jmjC domain-containing protein |
| | | | 8 [Homo sapiens] |
| 633 | gi\|166235894 | NM_001114089.1 | ectonucleoside triphosphate |
| | | | diphosphohydrolase 6 isoform 2 |
| | | | [Homo sapiens] |
| 634 | gi\|189571686 | NM_003731.2 | Sjoegren syndrome nuclear |
| | | | autoantigen 1 [Homo sapiens] |
| 635 | gi\|156071530 | NM_145802.3 | septin-6 isoform D |
| | | | [Homo sapiens] |
| 636 | gi\|98961132 | NM_025112.4 | zinc finger protein ZXDC |
| | | | isoform 1 [Homo sapiens] |
| 637 | gi\|66267729 | NM_052844.3 | WD repeat-containing protein |
| | | | 34 [Homo sapiens] |
| 638 | gi\|224586869 | NM_138443.3 | HAUS augmin-like complex |
| | | | subunit 1 [Homo sapiens] |
| 639 | gi\|197276595 | NM_006129.3 | bone morphogenetic protein 1 |
| | | | isoform 3 precursor |
| | | | [Homo sapiens] |
| 640 | gi\|161727457 | AB370195.1 | dihydropyrimidinase-like 2 |
| | | | long form [Homo sapiens] |
| 641 | gi\|89276761 | NM_032940.2 | DNA-directed RNA polymerase II |
| | | | subunit RPB3 [Homo sapiens] |
| 642 | gi\|197209876 | NM_003496.2 | transformation/transcription |
| | | | domain-associated protein |
| | | | [Homo sapiens] |
| 643 | gi\|119393884 | NM_005146.4 | U4/U6.U5 tri-snRNP-associated |
| | | | protein 1 [Homo sapiens] |
| 644 | gi\|38201691 | NM_007368.2 | ras GTPase-activating protein |
| | | | 3 [Homo sapiens] |
| 645 | gi\|22091458 | NM_014303.2 | pescadillo homolog |
| | | | [Homo sapiens] |
| 646 | gi\|55774983 | NM_015660.2 | GTPase IMAP family member 2 |
| | | | [Homo sapiens] |
| 647 | gi\|118498363 | NM_001079520.1 | dapper homolog 1 isoform 2 |
| | | | [Homo sapiens] |
| 648 | gi\|85062625 | NM_032377.3 | transcription elongation |
| | | | factor 1 homolog |
| | | | [Homo sapiens] |
| 649 | gi\|20357526 | NM_002074.2 | guanine nucleotide-binding |
| | | | protein G(I)/G(S)/G(T) subunit |
| | | | beta-1 [Homo sapiens] |
| 650 | gi\|194363754 | NM_000852.3 | glutathione S-transferase P |
| | | | [Homo sapiens] |
| 651 | gi\|46255046 | NM_001535.2 | protein arginine N- |
| | | | methyltransferase 2 isoform 1 |
| | | | [Homo sapiens] |
| 652 | gi\|157412269 | NM_031203.2 | heterogeneous nuclear |
| | | | ribonucleoprotein M isoform b |
| | | | [Homo sapiens] |
| 653 | gi\|223029468 | NM_006159.2 | protein kinase C-binding |
| | | | protein NELL2 isoform b |
| | | | precursor [Homo sapiens] |
| 654 | gi\|57863258 | NM_001008897.1 | T-complex protein 1 subunit |
| | | | alpha isoform b [Homo sapiens] |
| 655 | gi\|47078256 | NM_003778.3 | beta-1,4-galactosyltransferase |
| | | | 4 [Homo sapiens] |
| 656 | gi\|145611425 | NM_006814.3 | proteasome inhibitor PI31 |
| | | | subunit [Homo sapiens] |
| 657 | gi\|41406095 | NM_014003.3 | pre-mRNA-splicing factor ATP- |
| | | | dependent RNA helicase PRP16 |
| | | | [Homo sapiens] |
| 658 | gi\|178557737 | NM_006371.4 | cartilage-associated protein |
| | | | precursor [Homo sapiens] |
| 659 | gi\|91208424 | NM_012469.3 | pre-mRNA-processing factor 6 |
| | | | [Homo sapiens] |
| 660 | gi\|51871119 | NM_138401.2 | multivesicular body subunit |
| | | | 12A [Homo sapiens] |
| 661 | gi\|260898772 | NM_176812.4 | charged multivesicular body |
| | | | protein 4b [Homo sapiens] |
| 662 | gi\|142388930 | NM_152732.3 | radial spoke head protein 9 |
| | | | homolog isoform 1 |
| | | | [Homo sapiens] |
| 663 | gi\|320089575 | NM_001004333.4 | ribonuclease kappa |
| | | | [Homo sapiens] |
| 664 | gi\|76496473 | NM_000018.2 | very long-chain specific acyl- |
| | | | CoA dehydrogenase, |
| | | | mitochondrial isoform 1 |
| | | | precursor [Homo sapiens] |
| 665 | gi\|21618333 | NM_004003.2 | carnitine acetyltransferase |
| | | | isoform 2 [Homo sapiens] |
| 666 | gi\|38201713 | NM_001419.2 | ELAV-like protein 1 |
| | | | [Homo sapiens] |
| 667 | gi\|296531407 | NM_198155.3 | ES1 protein homolog, |
| | | | mitochondrial isoform Ib |
| | | | precursor [Homo sapiens] |
| 668 | gi\|45269143 | NM_012289.3 | kelch-like ECH-associated |
| | | | protein 1 [Homo sapiens] |
| 669 | gi\|41872645 | NM_014780.3 | cullin-7 isoform 2 |
| | | | [Homo sapiens] |
| 670 | gi\|42544178 | NM_012127.2 | cip1-interacting zinc finger |
| | | | protein isoform 1 |
| | | | [Homo sapiens] |
| 671 | gi\|34147607 | NM_015953.3 | nitric oxide synthase- |
| | | | interacting protein |
| | | | [Homo sapiens] |
| 672 | gi\|124256477 | NM_017974.3 | autophagy-related protein 16-1 |
| | | | isoform 2 [Homo sapiens] |
| 673 | gi\|110349768 | NM_024296.3 | coiled-coil domain-containing |
| | | | protein 28B [Homo sapiens] |
| 674 | gi\|40555764 | BC064481.1 | RNF187 protein [Homo sapiens] |
| 675 | gi\|194385887 | AK304513.1 | unnamed protein product |
| | | | [Homo sapiens] |
| 676 | gi\|194328721 | NM_001045556.2 | src-like-adapter isoform a |
| | | | [Homo sapiens] |
| 677 | gi\|31652219 | NM_133640.3 | mediator of RNA polymerase II |
| | | | transcription subunit 22 |
| | | | isoform b [Homo sapiens] |
| 678 | gi\|221136767 | NM_000371.3 | transthyretin precursor |
| | | | [Homo sapiens] |
| 679 | gi\|36287059 | NM_182709.1 | histone acetyltransferase KAT5 |
| | | | isoform 3 [Homo sapiens] |
| 680 | gi\|261399873 | NM_001009570.2 | T-complex protein 1 subunit |
| | | | eta isoform b [Homo sapiens] |
| 681 | gi\|42544141 | NM_202494.1 | PDZ domain-containing protein |
| | | | GIPC1 isoform 2 [Homo sapiens] |
| 682 | gi\|88501739 | NM_007032.5 | TRIO and F-actin-binding |
| | | | protein isoform 1 |
| | | | [Homo sapiens] |
| 683 | gi\|144953896 | NM_007184.3 | nischarin [Homo sapiens] |
| 684 | gi\|58331180 | NM_134265.2 | WD repeat and SOCS box- |
| | | | containing protein 1 isoform 2 |
| | | | [Homo sapiens] |
| 685 | gi\|217272837 | NM_006623.3 | D-3-phosphoglycerate |
| | | | dehydrogenase [Homo sapiens] |
| 686 | gi\|221136945 | NM_014502.4 | pre-mRNA-processing factor 19 |
| | | | [Homo sapiens] |
| 687 | gi\|117553614 | NM_016045.2 | protein slowmo homolog 2 |
| | | | [Homo sapiens] |
| 688 | gi\|15967154 | NM_016558.2 | SCAN domain-containing protein |
| | | | 1 isoform 1 [Homo sapiens] |
| 689 | gi\|74048433 | NM_016309.2 | leucine carboxyl |
| | | | methyltransferase 1 isoform a |
| | | | [Homo sapiens] |
| 690 | gi\|8922734 | NM_018255.1 | elongator complex protein 2 |
| | | | isoform 2 [Homo sapiens] |
| 691 | gi\|145275199 | NM_025080.3 | L-asparaginase [Homo sapiens] |
| 692 | gi\|42734378 | NM_138350.2 | THAP domain-containing protein |
| | | | 3 isoform 2 [Homo sapiens] |
| 693 | gi\|209915551 | NM_001760.3 | G1/S-specific cyclin-D3 |
| | | | isoform 2 [Homo sapiens] |
| 694 | gi\|156071497 | NM_004952.4 | ephrin-A3 precursor |
| | | | [Homo sapiens] |
| 695 | gi\|225579056 | NM_003049.3 | sodium/bile acid cotransporter |
| | | | [Homo sapiens] |
| 696 | gi\|284005308 | NM_004260.3 | ATP-dependent DNA helicase Q4 |
| | | | [Homo sapiens] |
| 697 | gi\|50726974 | NM_138501.4 | trans-2,3-enoyl-CoA reductase |
| | | | [Homo sapiens] |
| 698 | gi\|59710114 | NM_014679.3 | centrosomal protein of 57 kDa |
| | | | [Homo sapiens] |
| 699 | gi\|45643118 | NM_006117.2 | enoyl-CoA delta isomerase 2, |
| | | | mitochondrial isoform 1 |
| | | | [Homo sapiens] |
| 700 | gi\|111120323 | NM_006621.4 | putative |
| | | | adenosylhomocysteinase 2 |
| | | | isoform a [Homo sapiens] |
| 701 | gi\|33469977 | NM_182835.1 | sec1 family domain-containing |
| | | | protein 1 isoform b |
| | | | [Homo sapiens] |
| 702 | gi\|118200355 | NM_014394.2 | growth hormone-inducible |
| | | | transmembrane protein |
| | | | [Homo sapiens] |
| 703 | gi\|59850648 | NM_018443.2 | zinc finger protein 302 |
| | | | [Homo sapiens] |
| 704 | gi\|142371393 | NM_181505.2 | protein phosphatase 1 |
| | | | regulatory subunit 1B isoform |
| | | | 2 [Homo sapiens] |
| 705 | gi\|168480109 | NM_005225.2 | transcription factor E2F1 |
| | | | [Homo sapiens] |
| 706 | gi\|51102290 | NM_005395.2 | postmeiotic segregation |
| | | | increased 2-like 3 isoform 1 |
| | | | [Homo sapiens] |
| 707 | gi\|48255969 | NM_002969.3 | mitogen-activated protein |
| | | | kinase 12 [Homo sapiens] |
| 708 | gi\|170650722 | NM_014236.3 | dihydroxyacetone phosphate |
| | | | acyltransferase [Homo sapiens] |
| 709 | gi\|48527950 | NM_013365.3 | ADP-ribosylation factor- |
| | | | binding protein GGA1 isoform 1 |
| | | | [Homo sapiens] |
| 710 | gi\|213385322 | NM_001137559.1 | anaphase-promoting complex |
| | | | subunit 5 isoform b |
| | | | [Homo sapiens] |
| 711 | gi\|118498335 | NM_016520.2 | chromosome 9 open reading |
| | | | frame 78 [Homo sapiens] |
| 712 | gi\|37537686 | NM_018337.2 | zinc finger protein 444 |
| | | | [Homo sapiens] |
| 713 | gi\|68533248 | NM_018476.3 | protein BEX1 [Homo sapiens] |
| 714 | gi\|192449448 | NM_022066.3 | ubiquitin-conjugating enzyme |
| | | | E2 O [Homo sapiens] |
| 715 | gi\|12232384 | NM_022730.1 | COP9 signalosome complex |
| | | | subunit 7b [Homo sapiens] |
| 716 | gi\|201025398 | NM_024334.2 | transmembrane protein 43 |
| | | | [Homo sapiens] |
| 717 | gi\|38016923 | NM_006253.4 | 5′-AMP-activated protein |
| | | | kinase subunit beta-1 |
| | | | [Homo sapiens] |
| 718 | gi\|77404354 | NM_003908.3 | eukaryotic translation |
| | | | initiation factor 2 subunit 2 |
| | | | [Homo sapiens] |
| 719 | gi\|237649014 | NM_006824.2 | probable rRNA-processing |
| | | | protein EBP2 isoform 2 |
| | | | [Homo sapiens] |
| 720 | gi\|40068460 | NM_007284.3 | twinfilin-2 [Homo sapiens] |
| 721 | gi\|39780570 | NM_018116.2 | protein misato homolog 1 |
| | | | [Homo sapiens] |
| 722 | gi\|40068484 | NM_022834.3 | von Willebrand factor A |
| | | | domain-containing protein 1 |
| | | | isoform 1 precursor |
| | | | [Homo sapiens] |
| 723 | gi\|217416378 | NM_001142650.1 | heterogeneous nuclear |
| | | | ribonucleoprotein L-like |
| | | | isoform 2 [Homo sapiens] |
| 724 | gi\|71834871 | NM_178865.3 | serine incorporator 2 isoform |
| | | | 1 [Homo sapiens] |
| 725 | gi\|258547122 | NM_001151.3 | ADP/ATP translocase 1 |
| | | | [Homo sapiens] |
| 726 | gi\|260593722 | NM_001983.3 | DNA excision repair protein |
| | | | ERCC-1 isoform 2 |
| | | | [Homo sapiens] |
| 727 | gi\|52630340 | NM_002107.3 | histone H3.3 [Homo sapiens] |
| 728 | gi\|219879807 | NM_006325.3 | GTP-binding nuclear protein |
| | | | Ran [Homo sapiens] |
| 729 | gi\|23111017 | NM_152856.1 | RNA-binding protein 10 isoform |
| | | | 2 [Homo sapiens] |
| 730 | gi\|157785644 | NM_005876.4 | striated muscle preferentially |
| | | | expressed protein kinase |
| | | | isoform 1 [Homo sapiens] |
| 731 | gi\|52851442 | NM_006360.3 | eukaryotic translation |
| | | | initiation factor 3 subunit M |
| | | | [Homo sapiens] |
| 732 | gi\|197100772 | NM_020320.3 | probable arginyl-tRNA |
| | | | synthetase, mitochondrial |
| | | | precursor [Homo sapiens] |
| 733 | gi\|89337269 | NM_022749.5 | retinoic acid induced 16 |
| | | | [Homo sapiens] |
| 734 | gi\|47174858 | NM_025058.3 | tripartite motif-containing |
| | | | protein 46 [Homo sapiens] |
| 735 | gi\|109638742 | NM_031478.4 | hypothetical protein LOC83723 |
| | | | [Homo sapiens] |
| 736 | gi\|53729358 | NM_138361.3 | E3 ubiquitin-protein ligase |
| | | | LRSAM1 isoform 1 |
| | | | [Homo sapiens] |
| 737 | gi\|4506026 | NM_002720.1 | serine/threonine-protein |
| | | | phosphatase 4 catalytic |
| | | | subunit [Homo sapiens] |
| 738 | gi\|73858576 | NM_003254.2 | metalloproteinase inhibitor 1 |
| | | | precursor [Homo sapiens] |
| 739 | gi\|109150415 | NM_012293.1 | peroxidasin homolog precursor |
| | | | [Homo sapiens] |
| 740 | gi\|34365370 | BX641004.1 | hypothetical protein |
| | | | [Homo sapiens] |
| 741 | gi\|6005793 | NM_007213.1 | PRA1 family protein 2 |
| | | | [Homo sapiens] |
| 742 | gi\|33859677 | NM_017879.1 | zinc finger protein 416 |
| | | | [Homo sapiens] |
| 743 | gi\|149274652 | NM_020780.1 | patched domain-containing |
| | | | protein 2 [Homo sapiens] |
| 744 | gi\|50511940 | NM_133455.2 | EMI domain-containing protein |
| | | | 1 [Homo sapiens] |
| 745 | gi\|187608297 | NM_001660.3 | ADP-ribosylation factor 4 |
| | | | [Homo sapiens] |
| 746 | gi\|34335193 | NM_182720.1 | cAMP-responsive element |
| | | | modulator isoform g |
| | | | [Homo sapiens] |
| 747 | gi\|40549399 | NM_001894.4 | casein kinase I isoform |
| | | | epsilon [Homo sapiens] |
| 748 | gi\|197245333 | NM_005273.3 | guanine nucleotide-binding |
| | | | protein G(I)/G(S)/G(T) subunit |
| | | | beta-2 [Homo sapiens] |
| 749 | gi\|188497749 | NM_033500.2 | hexokinase-1 isoform HKI-td |
| | | | [Homo sapiens] |
| 750 | gi\|187828416 | NM_005586.3 | myoD family inhibitor |
| | | | [Homo sapiens] |
| 751 | gi\|38679891 | NM_006223.2 | peptidyl-prolyl cis-trans |
| | | | isomerase NIMA-interacting 4 |
| | | | isoform 1 [Homo sapiens] |
| 752 | gi\|221218992 | NM_003475.3 | ras association domain- |
| | | | containing protein 7 isoform 1 |
| | | | [Homo sapiens] |
| 753 | gi\|156071485 | NM_003680.3 | tyrosyl-tRNA synthetase, |
| | | | cytoplasmic [Homo sapiens] |
| 754 | gi\|58530880 | NM_004675.2 | GTP-binding protein Di-Ras3 |
| | | | [Homo sapiens] |
| 755 | gi\|150170698 | NM_015656.1 | kinesin-like protein KIF26A |
| | | | [Homo sapiens] |
| 756 | gi\|198386318 | NM_016188.4 | actin-like protein 6B |
| | | | [Homo sapiens] |
| 757 | gi\|49574501 | NM_016243.2 | NADH-cytochrome b5 reductase 1 |
| | | | [Homo sapiens] |
| 758 | gi\|34147350 | NM_023940.2 | ras-like protein family member |
| | | | 11B [Homo sapiens] |
| 759 | gi\|55749599 | NM_032451.1 | protein spire homolog 2 |
| | | | [Homo sapiens] |
| 760 | gi\|39992615 | BC064477.1 | PIM3 protein [Homo sapiens] |
| 761 | gi\|56118216 | NM_001008216.1 | UDP-glucose 4-epimerase |
| | | | [Homo sapiens] |
| 762 | gi\|27502382 | NM_172316.1 | homeobox protein Meis2 isoform |
| | | | h [Homo sapiens] |
| 763 | gi\|91208422 | NM_003302.2 | thyroid receptor-interacting |
| | | | protein 6 [Homo sapiens] |
| 764 | gi\|154800448 | NM_003433.3 | zinc finger protein 132 |
| | | | [Homo sapiens] |
| 765 | gi\|41872688 | NM_003660.2 | liprin-alpha-3 [Homo sapiens] |
| 766 | gi\|197382802 | NM_006769.3 | LIM domain transcription |
| | | | factor LMO4 [Homo sapiens] |
| 767 | gi\|253735774 | NM_001162383.1 | rho guanine nucleotide |
| | | | exchange factor 2 isoform 1 |
| | | | [Homo sapiens] |
| 768 | gi\|5730026 | NM_006559.1 | KH domain-containing, RNA- |
| | | | binding, signal transduction- |
| | | | associated protein 1 |
| | | | [Homo sapiens] |
| 769 | gi\|219555664 | NM_001143780.1 | solute carrier family 25 |
| | | | member 39 isoform a |
| | | | [Homo sapiens] |
| 770 | gi\|41393557 | NM_018032.3 | putative RNA-binding protein |
| | | | Luc7-like 1 isoform a [Homo |
| | | | sapiens] |
| 771 | gi\|149274623 | NM_030915.3 | protein LBH [Homo sapiens] |
| 772 | gi\|58761547 | NM_032538.1 | tau-tubulin kinase 1 |
| | | | [Homo sapiens] |
| 773 | gi\|34147461 | NM_033414.2 | zinc finger protein 622 |
| | | | [Homo sapiens] |
| 774 | gi\|304555613 | NM_152743.3 | BRCA1-associated ATM activator |
| | | | 1 [Homo sapiens] |
| 775 | gi\|229608893 | NM_181723.2 | EF-hand domain-containing |
| | | | family member A2 |
| | | | [Homo sapiens] |
| 776 | gi\|119964727 | NM_152783.3 | D-2-hydroxyglutarate |
| | | | dehydrogenase, mitochondrial |
| | | | precursor [Homo sapiens] |
| 777 | gi\|109148541 | NM_001605.2 | alanyl-tRNA synthetase, |
| | | | cytoplasmic [Homo sapiens] |
| 778 | gi\|83700234 | NM_001967.3 | eukaryotic initiation factor |
| | | | 4A-II [Homo sapiens] |
| 779 | gi\|105990523 | NM_000182.4 | trifunctional enzyme subunit |
| | | | alpha, mitochondrial precursor |
| | | | [Homo sapiens] |
| 780 | gi\|18201902 | NM_002109.3 | histidyl-tRNA synthetase, |
| | | | cytoplasmic [Homo sapiens] |
| 781 | gi\|78190460 | NM_000984.5 | 60S ribosomal protein L23a |
| | | | [Homo sapiens] |
| 782 | gi\|78190459 | NM_000978.3 | 60S ribosomal protein L23 |
| | | | [Homo sapiens] |
| 783 | gi\|45446742 | NM_007372.2 | ATP-dependent RNA helicase |
| | | | DDX42 [Homo sapiens] |
| 784 | gi\|61102726 | NM_015315.3 | la-related protein 1 isoform 1 |
| | | | [Homo sapiens] |
| 785 | gi\|112382376 | NM_014501.2 | ubiquitin-conjugating enzyme |
| | | | E2 S [Homo sapiens] |
| 786 | gi\|82830423 | NM_001037533.1 | GON-4-like protein isoform a |
| | | | [Homo sapiens] |
| 787 | gi\|110227844 | NM_024112.3 | hypothetical protein LOC79095 |
| | | | [Homo sapiens] |
| 788 | gi\|149363677 | NM_199287.2 | coiled-coil domain-containing |
| | | | protein 137 [Homo sapiens] |
| 789 | gi\|194353969 | NM_000681.3 | alpha-2A adrenergic receptor |
| | | | [Homo sapiens] |
| 790 | gi\|11038670 | NM_004339.2 | pituitary tumor-transforming |
| | | | gene 1 protein-interacting |
| | | | protein precursor |
| | | | [Homo sapiens] |
| 791 | gi\|87159810 | NM_004357.4 | CD151 antigen [Homo sapiens] |
| 792 | gi\|166235161 | NM_001839.3 | calponin-3 [Homo sapiens] |
| 793 | gi\|46411186 | NM_005234.3 | nuclear receptor subfamily 2 |
| | | | group F member 6 |
| | | | [Homo sapiens] |
| 794 | gi\|156071503 | NM_006908.4 | ras-related C3 botulinum toxin |
| | | | substrate 1 isoform Rac1 |
| | | | [Homo sapiens] |
| 795 | gi\|37577134 | NM_003348.3 | ubiquitin-conjugating enzyme |
| | | | E2 N [Homo sapiens] |
| 796 | gi\|37594440 | NM_003437.2 | zinc finger protein 136 |
| | | | [Homo sapiens] |
| 797 | gi\|197333754 | NM_006764.4 | interferon-related |
| | | | developmental regulator 2 |
| | | | [Homo sapiens] |
| 798 | gi\|31652256 | NM_005461.3 | transcription factor MafB |
| | | | [Homo sapiens] |
| 799 | gi\|114796625 | NM_013356.2 | monocarboxylate transporter 3 |
| | | | [Homo sapiens] |
| 800 | gi\|18496982 | NM_015526.1 | CAP-Gly domain-containing |
| | | | linker protein 3 |
| | | | [Homo sapiens] |
| 801 | gi\|323635445 | NM_020394.4 | zinc finger protein 695 |
| | | | isoform 1 [Homo sapiens] |
| 802 | gi\|197245455 | NM_022574.4 | PERQ amino acid-rich with GYF |
| | | | domain-containing protein 1 |
| | | | [Homo sapiens] |
| 803 | gi\|186928846 | NM_032830.2 | cirhin [Homo sapiens] |
| 804 | gi\|62241010 | NM_005163.2 | RAC-alpha serine/threonine- |
| | | | protein kinase [Homo sapiens] |
| 805 | gi\|38372939 | NM_001185.2 | zinc-alpha-2-glycoprotein |
| | | | precursor [Homo sapiens] |
| 806 | gi\|21735620 | NM_005918.2 | malate dehydrogenase, |
| | | | mitochondrial precursor |
| | | | [Homo sapiens] |
| 807 | gi\|115387093 | NM_003000.2 | succinate dehydrogenase |
| | | | [ubiquinone] iron-sulfur |
| | | | subunit, mitochondrial |
| | | | precursor [Homo sapiens] |
| 808 | gi\|54607088 | NM_001005914.1 | semaphorin-3B isoform 2 |
| | | | precursor [Homo sapiens] |
| 809 | gi\|56550050 | NM_006590.2 | U4/U6.U5 tri-snRNP-associated |
| | | | protein 2 [Homo sapiens] |
| 810 | gi\|38027945 | NM_006833.4 | COP9 signalosome complex |
| | | | subunit 6 [Homo sapiens] |
| 811 | gi\|57617038 | NM_015140.2 | tubulin--tyrosine ligase-like |
| | | | protein 12 [Homo sapiens] |
| 812 | gi\|110227859 | NM_016305.2 | SS18-like protein 2 |
| | | | [Homo sapiens] |
| 813 | gi\|222831567 | NM_033082.3 | SAP domain-containing |
| | | | ribonucleoprotein |
| | | | [Homo sapiens] |
| 814 | gi\|40548381 | NM_199249.1 | multidrug resistance-related |
| | | | protein [Homo sapiens] |
| 815 | gi\|89886471 | NM_206538.2 | hematopoietic signal peptide- |
| | | | containing isoform 2 |
| | | | [Homo sapiens] |
| 816 | gi\|19913440 | NM_002149.2 | hippocalcin-like protein 1 |
| | | | [Homo sapiens] |
| 817 | gi\|316983123 | NM_021029.5 | 60S ribosomal protein L36a |
| | | | isoform a [Homo sapiens] |
| 818 | gi\|55925657 | NM_002997.4 | syndecan-1 precursor |
| | | | [Homo sapiens] |
| 819 | gi\|46877103 | NM_003367.2 | upstream stimulatory factor 2 |
| | | | isoform 1 [Homo sapiens] |
| 820 | gi\|88853068 | NM_000638.3 | vitronectin precursor |
| | | | [Homo sapiens] |
| 821 | gi\|4503824 | NM_003505.1 | frizzled-1 precursor |
| | | | [Homo sapiens] |
| 822 | gi\|133908634 | NM_012109.2 | transmembrane protein 59-like |
| | | | precursor [Homo sapiens] |
| 823 | gi\|151101234 | NM_012461.2 | TERF1-interacting nuclear |
| | | | factor 2 isoform 2 |
| | | | [Homo sapiens] |
| 824 | gi\|221316691 | NM_020309.3 | vesicular glutamate |
| | | | transporter 1 [Homo sapiens] |
| 825 | gi\|165932369 | NM_024582.4 | protocadherin Fat 4 precursor |
| | | | [Homo sapiens] |
| 826 | gi\|52353305 | NM_001005210.1 | leucine-rich repeat-containing |
| | | | protein 55 [Homo sapiens] |
| 827 | gi\|194378373 | AK294825.1 | unnamed protein product |
| | | | [Homo sapiens] |
| 828 | gi\|32454740 | NM_001235.2 | serpin H1 precursor |
| | | | [Homo sapiens] |
| 829 | gi\|33598925 | NM_005506.2 | lysosome membrane protein 2 |
| | | | isoform 1 [Homo sapiens] |
| 830 | gi\|18201904 | NM_000175.2 | glucose-6-phosphate isomerase |
| | | | isoform 2 [Homo sapiens] |
| 831 | gi\|161169039 | NM_004548.2 | NADH dehydrogenase |
| | | | [ubiquinone] 1 beta subcomplex |
| | | | subunit 10 [Homo sapiens] |
| 832 | gi\|141801911 | NM_003295.2 | translationally-controlled |
| | | | tumor protein [Homo sapiens] |
| 833 | gi\|23397695 | NM_152925.1 | copine-1 isoform a |
| | | | [Homo sapiens] |
| 834 | gi\|197313723 | NM_005736.3 | alpha-centractin |
| | | | [Homo sapiens] |
| 835 | gi\|34147665 | NM_006374.3 | serine/threonine-protein |
| | | | kinase 25 [Homo sapiens] |
| 836 | gi\|54112115 | NM_006802.2 | splicing factor 3A subunit 3 |
| | | | [Homo sapiens] |
| 837 | gi\|63082031 | NM_015089.2 | cullin-9 [Homo sapiens] |
| 838 | gi\|41872442 | NM_199368.1 | short transient receptor |
| | | | potential channel 4-associated |
| | | | protein isoform b |
| | | | [Homo sapiens] |
| 839 | gi\|197100212 | NM_001610.2 | lysosomal acid phosphatase |
| | | | isoform 1 precursor |
| | | | [Homo sapiens] |
| 840 | gi\|169636438 | NM_000078.2 | cholesteryl ester transfer |
| | | | protein precursor |
| | | | [Homo sapiens] |
| 841 | gi\|169259765 | NM_001514.5 | transcription initiation |
| | | | factor IIB [Homo sapiens] |
| 842 | gi\|63253297 | NM_003132.2 | spermidine synthase |
| | | | [Homo sapiens] |
| 843 | gi\|37577149 | NM_016453.2 | NCR-interacting protein with |
| | | | SH3 domain isoform 1 |
| | | | [Homo sapiens] |
| 844 | gi\|37622893 | NM_194460.1 | RING finger protein 126 |
| | | | [Homo sapiens] |
| 845 | gi\|29171685 | NM_030768.2 | integrin-linked kinase- |
| | | | associated serine/threonine |
| | | | phosphatase 2C [Homo sapiens] |
| 846 | gi\|14150140 | NM_032346.1 | programmed cell death protein |
| | | | 2-like [Homo sapiens] |
| 847 | gi\|119120876 | NM_133474.2 | zinc finger protein 721 |
| | | | [Homo sapiens] |
| 848 | gi\|257471022 | NM_004930.3 | F-actin-capping protein |
| | | | subunit beta isoform 1 |
| | | | [Homo sapiens] |
| 849 | gi\|19718776 | NM_004111.4 | flap endonuclease 1 |
| | | | [Homo sapiens] |
| 850 | gi\|24797084 | NM_002265.4 | importin subunit beta-1 |
| | | | [Homo sapiens] |
| 851 | gi\|221316755 | NM_000425.3 | neural cell adhesion molecule |
| | | | L1 isoform 1 precursor |
| | | | [Homo sapiens] |
| 852 | gi\|171543862 | NM_000289.4 | 6-phosphofructokinase, muscle |
| | | | type isoform 2 [Homo sapiens] |
| 853 | gi\|4505940 | NM_000938.1 | DNA-directed RNA polymerase II |
| | | | subunit RPB2 [Homo sapiens] |
| 854 | gi\|156631004 | NM_002812.4 | 26S proteasome non-ATPase |
| | | | regulatory subunit 8 |
| | | | [Homo sapiens] |
| 855 | gi\|51477705 | NM_003078.3 | SWI/SNF-related matrix- |
| | | | associated actin-dependent |
| | | | regulator of chromatin |
| | | | subfamily D member 3 isoform 1 |
| | | | [Homo sapiens] |
| 856 | gi\|38505154 | NM_003195.4 | transcription elongation |
| | | | factor A protein 2 isoform a |
| | | | [Homo sapiens] |
| 857 | gi\|63162571 | NM_005998.3 | T-complex protein 1 subunit |
| | | | gamma isoform a [Homo sapiens] |
| 858 | gi\|55769586 | NM_003703.1 | nucleolar protein 14 |
| | | | [Homo sapiens] |
| 859 | gi\|95147537 | NM_006051.3 | amyloid beta A4 precursor |
| | | | protein-binding family B |
| | | | member 3 isoform d |
| | | | [Homo sapiens] |
| 860 | gi\|8922332 | NM_018049.1 | pleckstrin homology domain- |
| | | | containing family J member 1 |
| | | | [Homo sapiens] |
| 861 | gi\|32484989 | NM_018639.3 | WD repeat and SOCS box- |
| | | | containing protein 2 |
| | | | [Homo sapiens] |
| 862 | gi\|215599267 | NM_032039.2 | protein ITFG3 [Homo sapiens] |
| 863 | gi\|21362049 | NM_032357.2 | coiled-coil domain-containing |
| | | | protein 115 [Homo sapiens] |
| 864 | gi\|160420327 | NM_194279.2 | iron-sulfur cluster assembly 2 |
| | | | homolog, mitochondrial |
| | | | precursor [Homo sapiens] |
| 865 | gi\|111494227 | NM_001418.3 | eukaryotic translation |
| | | | initiation factor 4 gamma 2 |
| | | | isoform 1 [Homo sapiens] |
| 866 | gi\|61835203 | NM_001013436.1 | 3-mercaptopyruvate |
| | | | sulfurtransferase isoform 2 |
| | | | [Homo sapiens] |
| 867 | gi\|39725687 | NM_005002.3 | NADH dehydrogenase |
| | | | [ubiquinone] 1 alpha |
| | | | subcomplex subunit 9, |
| | | | mitochondrial precursor |
| | | | [Homo sapiens] |
| 868 | gi\|106049291 | NM_022172.2 | pyruvate carboxylase, |
| | | | mitochondrial precursor |
| | | | [Homo sapiens] |
| 869 | gi\|156416002 | NM_004168.2 | succinate dehydrogenase |
| | | | [ubiquinone] flavoprotein |
| | | | subunit, mitochondrial |
| | | | precursor [Homo sapiens] |
| 870 | gi\|209413761 | NM_017586.2 | calcium channel flower homolog |
| | | | isoform a [Homo sapiens] |
| 871 | gi\|166197689 | NM_001114090.1 | ephexin-1 isoform 2 |
| | | | [Homo sapiens] |
| 872 | gi\|75677342 | NM_015544.2 | transmembrane protein 98 |
| | | | [Homo sapiens] |
| 873 | gi\|187829451 | NM_001127231.1 | autism susceptibility gene 2 |
| | | | protein isoform 2 |
| | | | [Homo sapiens] |
| 874 | gi\|218751872 | NM_018645.4 | transcription cofactor HES-6 |
| | | | isoform a [Homo sapiens] |
| 875 | gi\|91807118 | NM_025141.3 | TM2 domain-containing protein |
| | | | 3 isoform b [Homo sapiens] |
| 876 | gi\|114520614 | NM_001954.4 | epithelial discoidin domain- |
| | | | containing receptor 1 isoform |
| | | | 1 precursor [Homo sapiens] |
| 877 | gi\|186659502 | NM_031263.2 | heterogeneous nuclear |
| | | | ribonucleoprotein K isoform a |
| | | | [Homo sapiens] |
| 878 | gi\|313760623 | NM_000442.4 | platelet endothelial cell |
| | | | adhesion molecule precursor |
| | | | [Homo sapiens] |
| 879 | gi\|34335279 | NM_002811.3 | 26S proteasome non-ATPase |
| | | | regulatory subunit 7 |
| | | | [Homo sapiens] |
| 880 | gi\|30581139 | NM_006263.2 | proteasome activator complex |
| | | | subunit 1 isoform 1 |
| | | | [Homo sapiens] |
| 881 | gi\|78191800 | NM_000997.4 | 60S ribosomal protein L37 |
| | | | [Homo sapiens] |
| 882 | gi\|197927095 | NM_001030.4 | 40S ribosomal protein S27 |
| | | | [Homo sapiens] |
| 883 | gi\|21396499 | NM_003609.2 | HIRA-interacting protein 3 |
| | | | [Homo sapiens] |
| 884 | gi\|25777595 | NM_003648.2 | diacylglycerol kinase delta |
| | | | isoform 1 [Homo sapiens] |
| 885 | gi\|52486264 | NM_006029.4 | paraneoplastic antigen Ma1 |
| | | | [Homo sapiens] |
| 886 | gi\|57242773 | NM_014680.2 | hypothetical protein LOC9703 |
| | | | precursor [Homo sapiens] |
| 887 | gi\|151108508 | NM_014859.4 | rho GTPase-activating protein |
| | | | 44 [Homo sapiens] |
| 888 | gi\|104876422 | NM_006040.2 | heparan sulfate glucosamine 3- |
| | | | O-sulfotransferase 4 |
| | | | [Homo sapiens] |
| 889 | gi\|110349723 | NM_021267.3 | LAG1 longevity assurance |
| | | | homolog 1 isoform 1 |
| | | | [Homo sapiens] |
| 890 | gi\|166795249 | NM_006845.3 | kinesin-like protein KIF2C |
| | | | [Homo sapiens] |
| 891 | gi\|38570153 | NM_012279.2 | zinc finger protein 346 |
| | | | [Homo sapiens] |
| 892 | gi\|156602659 | NM_018206.4 | vacuolar protein sorting- |
| | | | associated protein 35 |
| | | | [Homo sapiens] |
| 893 | gi\|17978480 | NM_080413.1 | vacuolar protein sorting- |
| | | | associated protein 16 homolog |
| | | | isoform 3 [Homo sapiens] |
| 894 | gi\|40807483 | NM_030815.2 | p53 and DNA damage-regulated |
| | | | protein 1 [Homo sapiens] |
| 895 | gi\|47132623 | NM_145798.2 | oxysterol-binding protein- |
| | | | related protein 7 |
| | | | [Homo sapiens] |
| 896 | gi\|86198309 | NM_001039355.1 | mitochondrial |
| | | | carnitine/acylcarnitine |
| | | | carrier protein CACL |
| | | | [Homo sapiens] |
| 897 | gi\|194097322 | NM_004092.3 | enoyl-CoA hydratase, |
| | | | mitochondrial precursor |
| | | | [Homo sapiens] |
| 898 | gi\|10434001 | AK022548.1 | unnamed protein product |
| | | | [Homo sapiens] |
| 899 | gi\|54792063 | NM_003352.4 | small ubiquitin-related |
| | | | modifier 1 isoform a precursor |
| | | | [Homo sapiens] |
| 900 | gi\|83281439 | NM_003757.2 | eukaryotic translation |
| | | | initiation factor 3 subunit I |
| | | | [Homo sapiens] |
| 901 | gi\|33469915 | NM_003906.3 | 80 kDa MCM3-associated protein |
| | | | [Homo sapiens] |
| 902 | gi\|195972858 | NM_004228.5 | cytohesin-2 isoform 2 |
| | | | [Homo sapiens] |
| 903 | gi\|42716281 | NM_013242.2 | transcription factor IIB |
| | | | [Homo sapiens] |
| 904 | gi\|56676378 | NM_016004.2 | intraflagellar transport |
| | | | protein 52 homolog |
| | | | [Homo sapiens] |
| 905 | gi\|261490711 | NM_138399.4 | transmembrane protein 44 |
| | | | isoform a [Homo sapiens] |
| 906 | gi\|41327758 | NM_001697.2 | ATP synthase subunit O, |
| | | | mitochondrial precursor |
| | | | [Homo sapiens] |
| 907 | gi\|124053441 | NM_000934.3 | alpha-2-antiplasmin isoform a |
| | | | precursor [Homo sapiens] |
| 908 | gi\|47132573 | NM_002733.3 | 5′-AMP-activated protein |
| | | | kinase subunit gamma-1isoform |
| | | | 1 [Homo sapiens] |
| 909 | gi\|47132588 | NM_002741.3 | serine/threonine-protein |
| | | | kinase N1 isoform 2 |
| | | | [Homo sapiens] |
| 910 | gi\|257196241 | NM_001063.3 | serotransferrin precursor |
| | | | [Homo sapiens] |
| 911 | gi\|205277461 | NM_001064.2 | transketolase [Homo sapiens] |
| 912 | gi\|253795505 | NM_004699.2 | XAP-5 protein [Homo sapiens] |
| 913 | gi\|115527096 | NM_006035.3 | serine/threonine-protein |
| | | | kinase MRCK beta |
| | | | [Homo sapiens] |
| 914 | gi\|68161505 | NM_005718.3 | actin-related protein 2/3 |
| | | | complex subunit 4 isoform a |
| | | | [Homo sapiens] |
| 915 | gi\|194097343 | NM_001114107.2 | PDZ and LIM domain protein 3 |
| | | | isoform b [Homo sapiens] |
| 916 | gi\|32307179 | NM_016139.2 | coiled-coil-helix-coiled-coil- |
| | | | helix domain-containing |
| | | | protein 2, mitochondrial |
| | | | precursor [Homo sapiens] |
| 917 | gi\|170932470 | NM_024650.3 | putative uncharacterized |
| | | | protein C11orf80 |
| | | | [Homo sapiens] |
| 918 | gi\|221218971 | NM_031209.2 | queuine tRNA- |
| | | | ribosyltransferase |
| | | | [Homo sapiens] |
| 919 | gi\|54607109 | NM_174929.2 | zinc finger MIZ domain- |
| | | | containing protein 2 isoform 2 |
| | | | [Homo sapiens] |
| 920 | gi\|58761495 | NM_001011724.1 | heterogeneous nuclear |
| | | | ribonucleoprotein A1-like 2 |
| | | | [Homo sapiens] |
| 921 | gi\|117956372 | NM_001077685.1 | arf-GAP with GTPase, ANK |
| | | | repeat and PH domain- |
| | | | containing protein 7 |
| | | | [Homo sapiens] |
| 922 | gi\|50301237 | NM_000637.2 | glutathione reductase, |
| | | | mitochondrial isoform 1 |
| | | | precursor [Homo sapiens] |
| 923 | gi\|48255890 | NM_001001329.1 | glucosidase 2 subunit beta |
| | | | isoform 2 [Homo sapiens] |
| 924 | gi\|42544245 | NM_003009.2 | selenoprotein W [Homo sapiens] |
| 925 | gi\|6102857 | AL122064.1 | hypothetical protein [Homo |
| | | | sapiens] |
| 926 | gi\|186928845 | NM_032476.3 | 28S ribosomal protein S6, |
| | | | mitochondrial [Homo sapiens] |
| 927 | gi\|19913436 | NM_001694.2 | V-type proton ATPase 16 kDa |
| | | | proteolipid subunit |
| | | | [Homo sapiens] |
| 928 | gi\|205277389 | NM_004082.3 | dynactin subunit 1 isoform 1 |
| | | | [Homo sapiens] |
| 929 | gi\|55750040 | NM_001940.3 | atrophin-1 [Homo sapiens] |
| 930 | gi\|156071491 | NM_002086.4 | growth factor receptor-bound |
| | | | protein 2 isoform 1 |
| | | | [Homo sapiens] |
| 931 | gi\|194018519 | NM_002094.3 | eukaryotic peptide chain |
| | | | release factor GTP-binding |
| | | | subunit ERF3A isoform 1 |
| | | | [Homo sapiens] |
| 932 | gi\|41399283 | NM_002156.4 | 60 kDa heat shock protein, |
| | | | mitochondrial [Homo sapiens] |
| 933 | gi\|116829963 | NM_002256.3 | metastasis-suppressor KiSS-1 |
| | | | [Homo sapiens] |
| 934 | gi\|153945727 | NM_005909.3 | microtubule-associated protein |
| | | | 1B [Homo sapiens] |
| 935 | gi\|189409157 | NM_016841.3 | microtubule-associated protein |
| | | | tau isoform 4 [Homo sapiens] |
| 936 | gi\|14043021 | NM_004990.2 | methionyl-tRNA synthetase, |
| | | | cytoplasmic [Homo sapiens] |
| 937 | gi\|32307122 | NM_004576.2 | serine/threonine-protein |
| | | | phosphatase 2A 55 kDa |
| | | | regulatory subunit B beta |
| | | | isoform isoform a |
| | | | [Homo sapiens] |
| 938 | gi\|22538466 | NM_002796.2 | proteasome subunit beta type-4 |
| | | | [Homo sapiens] |
| 939 | gi\|48762925 | NM_005049.2 | periodic tryptophan protein 2 |
| | | | homolog [Homo sapiens] |
| 940 | gi\|71164881 | NM_001013.3 | 40S ribosomal protein S9 |
| | | | [Homo sapiens] |
| 941 | gi\|171846267 | NM_005726.4 | elongation factor Ts, |
| | | | mitochondrial isoform 2 |
| | | | precursor [Homo sapiens] |
| 942 | gi\|23238209 | NM_005731.2 | actin-related protein 2/3 |
| | | | complex subunit 2 |
| | | | [Homo sapiens] |
| 943 | gi\|14971416 | NM_005762.2 | transcription intermediary |
| | | | factor 1-beta [Homo sapiens] |
| 944 | gi\|207028746 | NM_006096.3 | protein NDRG1 [Homo sapiens] |
| 945 | gi\|22907051 | NM_006409.2 | actin-related protein 2/3 |
| | | | complex subunit 1A isoform 1 |
| | | | [Homo sapiens] |
| 946 | gi\|11055016 | AF142569.1 | hypothetical protein SBBI23 |
| | | | [Homo sapiens] |
| 947 | gi\|112421107 | NM_015125.3 | protein capicua homolog |
| | | | [Homo sapiens] |
| 948 | gi\|56676386 | NM_007364.2 | transmembrane emp24 domain- |
| | | | containing protein 3 precursor |
| | | | [Homo sapiens] |
| 949 | gi\|56676313 | NM_002568.3 | polyadenylate-binding protein |
| | | | 1 [Homo sapiens] |
| 950 | gi\|24431995 | NM_020145.2 | endophilin-B2 [Homo sapiens] |
| 951 | gi\|141802780 | NM_052868.2 | immunoglobulin superfamily |
| | | | member 8 [Homo sapiens] |
| 952 | gi\|17149812 | NM_057161.2 | kelch domain-containing |
| | | | protein 3 isoform 1 |
| | | | [Homo sapiens] |
| 953 | gi\|28274700 | NM_145806.2 | zinc finger protein 511 |
| | | | [Homo sapiens] |
| 954 | gi\|4505488 | NM_002539.1 | ornithine decarboxylase |
| | | | [Homo sapiens] |
| 955 | gi\|78217389 | NM_001004.3 | 60S acidic ribosomal protein |
| | | | P2 [Homo sapiens] |
| 956 | gi\|62739176 | NM_002950.3 | dolichyl- |
| | | | diphosphooligosaccharide-- |
| | | | protein glycosyltransferase |
| | | | subunit 1 precursor |
| | | | [Homo sapiens] |
| 957 | gi\|194595508 | NM_001130438.1 | spectrin alpha chain, brain |
| | | | isoform 1 [Homo sapiens] |
| 958 | gi\|13236578 | NM_024330.1 | long-chain fatty acid |
| | | | transport protein 3 |
| | | | [Homo sapiens] |
| 959 | gi\|215277016 | NM_001142370.1 | tyrosine-protein phosphatase |
| | | | non-receptor type 18 isoform 2 |
| | | | [Homo sapiens] |
| 960 | gi\|194018569 | NM_017918.4 | coiled-coil domain-containing |
| | | | protein 109B [Homo sapiens] |
| 961 | gi\|256818771 | NM_018285.3 | U3 small nucleolar |
| | | | ribonucleoprotein protein IMP3 |
| | | | [Homo sapiens] |
| 962 | gi\|209976985 | NM_018386.2 | PCI domain-containing protein |
| | | | 2 [Homo sapiens] |
| 963 | gi\|113722119 | NM_032119.3 | G-protein coupled receptor 98 |
| | | | precursor [Homo sapiens] |
| 964 | gi\|10438604 | AK025936.1 | unnamed protein product |
| | | | [Homo sapiens] |
| 965 | gi\|50234894 | NM_173473.2 | anaphase-promoting complex |
| | | | subunit 16 isoform 1 |
| | | | [Homo sapiens] |
| 966 | gi\|207028465 | NM_005566.3 | L-lactate dehydrogenase A |
| | | | chain isoform 1 [Homo sapiens] |
| 967 | gi\|194440683 | NM_002337.2 | alpha-2-macroglobulin |
| | | | receptor-associated protein |
| | | | precursor [Homo sapiens] |
| 968 | gi\|33356548 | NM_002388.3 | DNA replication licensing |
| | | | factor MCM3 [Homo sapiens] |
| 969 | gi\|28193181 | BX248001.1 | unnamed protein product |
| | | | [Homo sapiens] |
| 970 | gi\|33598947 | NM_002660.2 | 1-phosphatidylinositol-4,5- |
| | | | bisphosphate phosphodiesterase |
| | | | gamma-1 isoform a |
| | | | [Homo sapiens] |
| 971 | gi\|223468675 | NM_021975.3 | transcription factor p65 |
| | | | isoform 1 [Homo sapiens] |
| 972 | gi\|49640008 | NM_003316.3 | E3 ubiquitin-protein ligase |
| | | | TTC3 [Homo sapiens] |
| 973 | gi\|166064032 | NM_145735.2 | rho guanine nucleotide |
| | | | exchange factor 7 isoform b |
| | | | [Homo sapiens] |
| 974 | gi\|83716023 | NM_017596.2 | kinesin-like protein KIF21B |
| | | | [Homo sapiens] |
| 975 | gi\|109148507 | NM_017670.2 | ubiquitin thioesterase OTUB1 |
| | | | [Homo sapiens] |
| 976 | gi\|11034854 | NM_020644.1 | transmembrane protein 9B |
| | | | precursor [Homo sapiens] |
| 977 | gi\|50345990 | NM_001001975.1 | ATP synthase subunit delta, |
| | | | mitochondrial precursor |
| | | | [Homo sapiens] |
| 978 | gi\|145580576 | NM_001329.2 | C-terminal-binding protein 2 |
| | | | isoform 1 [Homo sapiens] |
| 979 | gi\|226958667 | NM_004107.4 | IgG receptor FcRn large |
| | | | subunit p51 precursor |
| | | | [Homo sapiens] |
| 980 | gi\|51476153 | CR749210.1 | hypothetical protein |
| | | | [Homo sapiens] |
| 981 | gi\|193082959 | NM_014487.4 | zinc finger protein 330 |
| | | | [Homo sapiens] |
| 982 | gi\|156416004 | NM_014186.3 | COMM domain-containing protein |
| | | | 9 isoform 1 [Homo sapiens] |

1-13. (canceled)

14. A method for identifying marker sequences for breast cancer, comprising
a. identifying marker sequence candidates for breast cancer in that a support, on which at least 1,000 different proteins are immobilised, is brought into contact with a serum sample from a patient with breast cancer and proteins that demonstrate an interaction with the serum are identified (marker sequence candidates), and
b. determining the interaction of one or more marker sequence candidates from a. with the serum from female patients with breast cancer is compared with
the interaction of the marker sequence candidate(s) from a. with the serum from female patients with benign changes and
the interaction of the marker sequence candidate(s) from a. with the serum of healthy control individuals, and
c. identifying marker sequences that demonstrate an interaction with the serum from female patients with breast cancer that is different compared with the interaction with the serum from female patients with benign changes and the serum from healthy control individuals, and wherein the evaluation is performed by means of statistical analysis.

15. The method according to claim 14, wherein the marker sequences are specific for breast cancer with a high risk of metastasis formation.

16. A marker sequence for breast cancer obtainable by a method according to claim 14 and selected from the sequences comprising SEQ ID No. 1-1473 and partial sequences of SEQ ID No. 1-1473 with at least 90%, preferably 95%, of the length of the sequences SEQ ID No. 1-1473 and homologues of SEQ ID No. 1-1473 and partial sequences thereof with an identity of at least 95%, preferably 98% or more, to the corresponding nucleic acid and/or protein sequences and sequences coded by SEQ ID No. 1-491, partial sequences thereof and homologues thereof.

17. An arrangement of marker sequences for breast cancer, comprising one or more marker sequences according to claim 16.

18. A protein array comprising one or more marker sequences according to claim 16.

19. A diagnostic tool comprising one or more marker sequences according to claim 16 and optionally further additives and/or excipients.

20. A test kit comprising one or more marker sequences according to claim 16 and optionally further additives and/or excipients.

21. The arrangement according to claim 17, characterised in that 2 or 3, preferably 4 or 5, particularly preferably 7 or 8 or more, different marker sequences for breast cancer are used simultaneously.

22. Use of one or more marker sequences according to claim 16 for the early detection, diagnosis, prognosis, therapy control and/or aftercare in the case of breast cancer.

23. Use of one or more marker sequences according to claim 16 to distinguish breast cancer from benign changes.

24. Use of one or more marker sequences according to claim 16 for the individualized diagnosis and/or therapy in individual patients, patient groups, cohorts, population groups, variants of breast cancer, or stages of breast cancer.

25. Use of one or more marker sequences according to claim 16 for the detection and/or for the determination of the quantity of one or more breast cancer-associated autoantibodies, for example in bodily fluid or tissue of a patient.

26. Use of one or more marker sequences according to claim 16 for the analysis of autoantibody profiles of patients, in particular for the qualitative and/or quantitative analysis of autoantibodies and/or for the monitoring of changes of autoantibody profiles, for example in bodily fluids such as serum, tissue or tissue samples from the patient.

27. Use of one or more marker sequences according to claim 16 for the screening of substances (active agents) for breast cancer.

28. A target for the treatment and/or therapy of breast cancer selected from the marker sequences according to claim 16.

29. A method for the early detection, diagnosis, prognosis, therapy control and/or aftercare in the case of breast cancer, wherein
a.) a marker sequence or a number of marker sequences selected from the group comprising sequences SEQ ID No. 1-1473 and partial sequences of SEQ ID No. 1-1473 with at least 90%, preferably 95%, of the length of the sequences SEQ ID No. 1-1473 and homologues of SEQ ID No. 1-1473 and partial sequences thereof with an identity of at least 95%, preferably 98% or more, to the corresponding nucleic acid and/or protein sequences and sequences coded by SEQ ID No. 1-491, partial sequences thereof and homologues thereof is/are applied to a support,
b.) is/are brought into contact with bodily fluid or tissue sample from a patient, and
c.) an interaction of the bodily fluid or the tissue sample with the marker sequence(s) for breast cancer a from a.) is detected.

The application's sequence listing, which the Patent Office published only in electronic form, follows.

SEQUENCE LISTING (1473 sequences)

SEQ ID NO: 1 - DNA, 1158 bp, Homo Sapiens
  misc_feature (843)..(843): n is a, c, g, or t
  misc_feature (888)..(888): n is a, c, g, or t
  misc_feature (910)..(910): n is a, c, g, or t
  misc_feature (932)..(932): n is a, c, g, or t
  misc_feature (935)..(935): n is a, c, g, or t
  misc_feature (940)..(940): n is a, c, g, or t
  misc_feature (944)..(944): n is a, c, g, or t
  misc_feature (949)..(949): n is a, c, g, or t
  misc_feature (955)..(955): n is a, c, g, or t
  misc_feature (981)..(981): n is a, c, g, or t
  misc_feature (987)..(987): n is a, c, g, or t
  misc_feature (998)..(998): n is a, c, g, or t
  misc_feature (1001)..(1001): n is a, c, g, or t
  misc_feature (1004)..(1004): n is a, c, g, or t
  misc_feature (1010)..(1010): n is a, c, g, or t
  misc_feature (1013)..(1013): n is a, c, g, or t
  misc_feature (1020)..(1020): n is a, c, g, or t
  misc_feature (1034)..(1034): n is a, c, g, or t
  misc_feature (1036)..(1036): n is a, c, g, or t
  misc_feature (1042)..(1042): n is a, c, g, or t
  misc_feature (1046)..(1046): n is a, c, g, or t
  misc_feature (1058)..(1058): n is a, c, g, or t
  misc_feature (1060)..(1061): n is a, c, g, or t
  misc_feature (1065)..(1065): n is a, c, g, or t
  misc_feature (1072)..(1072): n is a, c, g, or t
  misc_feature (1100)..(1100): n is a, c, g, or t
  misc_feature (1111)..(1111): n is a, c, g, or t
  misc_feature (1116)..(1116): n is a, c, g, or t
  misc_feature (1118)..(1118): n is a, c, g, or t
  misc_feature (1127)..(1128): n is a, c, g, or t
  misc_feature (1133)..(1133): n is a, c, g, or t
  misc_feature (1139)..(1139): n is a, c, g, or t
  misc_feature (1153)..(1153): n is a, c, g, or t
  misc_feature (1157)..(1157): n is a, c, g, or t
agagagattactatgagaggatcgcatcaccatcaccatcacggatcctatttaggtgacactatagaatcgtcgacccacgcgtccggctccatcttcacgggcgcccaggaccctggcctgcagagacgctcccgccacaggatccagagcaagcaccgccccctggacgagcgggccctgcaggagaagctgaagtactttcctgtgtgtgtgagcaccaagccggagcccgaggacgatgcagaagagggacttgggggtcttcccagcaacatcagctctgtcagctccttgctgctcttcaacaccaccgagaacctgtacaagaagtatgtcttcctggaccccctggctggtgctgtaacaaagacccatgtgatgctgggggcagagacagaggagaagctgtttgatgcccccttgtccatcagcaagagagagcagctggaacagcaggtcccagagaactacttctatgtgccagacctgggccaggtgcctgagattgatgttccgtcctacctgcctgacctgcccggcattgccaacgacctcatgtacagtgccgacctgggccccggcattgccccctctgcccctggcaccattccggaactgcccaccttccacactgaggtagccgagcctctcaaggcagacctacaagatggggtactaacagcaccaccaccacccccaccgcccccaccacctcccccagctcctgaggtgctggccagtgcatccccactcccaccctcaaccgcggcccctgtaggccaaggcgccaggcaggacgacagcagcagcagcgcgtctccttcagtccagggagctccnaggaaagtggtcgacccctccggtggccgggccactctgctaaantccatccgccaagctggggggncatcggcaaggccaagctgccncancgtgnaagnaaccnaaaagntggaaaaaaaaaaaaccaaaaaggancaggancaagtgaaaanccnccnacccanggnggggaanttgatgttcggatntnttcaanaaanctggttcttgangnnccangggcatntctgggaaaagaacctgggggctgggtnaggggcccggnagaancnttttccccnntggtnaaatcnatccttcttttgcncccnc

SEQ ID NO: 2 - DNA, 1090 bp, Homo Sapiens
  misc_feature (2)..(5): n is a, c, g, or t
  misc_feature (7)..(7): n is a, c, g, or t
  misc_feature (769)..(769): n is a, c, g, or t
  misc_feature (790)..(790): n is a, c, g, or t
  misc_feature (793)..(793): n is a, c, g, or t
  misc_feature (819)..(819): n is a, c, g, or t
  misc_feature (827)..(827): n is a, c, g, or t
  misc_feature (846)..(846): n is a, c, g, or t
  misc_feature (851)..(851): n is a, c, g, or t
  misc_feature (867)..(867): n is a, c, g, or t
  misc_feature (879)..(879): n is a, c, g, or t
  misc_feature (903)..(903): n is a, c, g, or t
  misc_feature (922)..(922): n is a, c, g, or t
  misc_feature (925)..(925): n is a, c, g, or t
  misc_feature (930)..(930): n is a, c, g, or t
  misc_feature (933)..(933): n is a, c, g, or t
  misc_feature (938)..(938): n is a, c, g, or t
  misc_feature (945)..(945): n is a, c, g, or t
  misc_feature (957)..(957): n is a, c, g, or t
  misc_feature (968)..(968): n is a, c, g, or t
  misc_feature (984)..(984): n is a, c, g, or t
  misc_feature (997)..(997): n is a, c, g, or t
  misc_feature (1000)..(1000): n is a, c, g, or t
  misc_feature (1002)..(1003): n is a, c, g, or t
  misc_feature (1006)..(1006): n is a, c, g, or t
  misc_feature (1018)..(1018): n is a, c, g, or t
  misc_feature (1021)..(1021): n is a, c, g, or t
  misc_feature (1041)..(1041): n is a, c, g, or t
  misc_feature (1044)..(1045): n is a, c, g, or t
  misc_feature (1048)..(1049): n is a, c, g, or t
  misc_feature (1057)..(1057): n is a, c, g, or t
  misc_feature (1071)..(1071): n is a, c, g, or t
  misc_feature (1076)..(1076): n is a, c, g, or t
cnnnnanaatagagaaattactatgagaggatcgcatcaccatcaccatcacggatcctatttaggtgacactatagaatcgtcgacccacgcgtccgcagcgctgcacccccttcatgtagctttcgatgcttgtttctttccgtctttgttgtcactatctttgtctatcagtacgaaagtacaaagtagctgccggcaatgaaataggggtgctgtttgcacctgcaggttaggggtggaggcgtttagaattttggggtgtgattgagccccgtttataattagaatgcccctggacccctaccactctgtgacgtgggggcacgcgcagggatcccatcattttgtgtttggggagctcagagtgcgcccaatcttggaatctttaagggatgagccagacccagacccgcggccttctagagagggtccggcagggagggtcggcgccctggcccggggtgggccggagccctgtgatgctgcatcgcccccaggaggagccagctgtgccccagagttggcgcggccgagagaggacaagagcgcgcagcaggcgaagctggagggcgggactcgactttgttgtcgctgcccggaggagtcgagactggtacccggaggagctgtctcaccaggagacccacgtcctggaagtgtccgggactcgcgggacctgtggctgcagaccccgccggcacgcaggcccagagctggcgcactcctgaagatgagactctgggggccctaaccggggtccacgggnagggctgtcccttggggactntangatggcttcgttctggcccggctcanttctggancctgtgaaaacccaaaganaaaangggctgaaaggatttntcatttgaaaanaatttcgtgccggaaaaaaccccntgaatccctaaggaatttntcntcttnaanactcnaaaaggntttaataacccnggaaacccccntgggcaaaaaaatttnacccccccggccnatncnntgntttaactccggnaangtaaaagggttaaaaacccnaannctnnaaaacccnggaaaataaatttnctttncaaaggtccggaaa

SEQ ID NO: 3 - DNA, 1126 bp, Homo Sapiens
  misc_feature (889)..(889): n is a, c, g, or t
  misc_feature (894)..(894): n is a, c, g, or t
  misc_feature (920)..(920): n is a, c, g, or t
  misc_feature (927)..(927): n is a, c, g, or t
  misc_feature (936)..(936): n is a, c, g, or t
  misc_feature (941)..(941): n is a, c, g, or t
  misc_feature (946)..(946): n is a, c, g, or t
  misc_feature (955)..(955): n is a, c, g, or t
  misc_feature (958)..(958): n is a, c, g, or t
  misc_feature (961)..(961): n is a, c, g, or t
  misc_feature (963)..(963): n is a, c, g, or t
  misc_feature (966)..(966): n is a, c, g, or t
  misc_feature (978)..(978): n is a, c, g, or t
  misc_feature (985)..(985): n is a, c, g, or t
  misc_feature (999)..(999): n is a, c, g, or t
  misc_feature (1020)..(1020): n is a, c, g, or t
  misc_feature (1027)..(1027): n is a, c, g, or t
  misc_feature (1032)..(1032): n is a, c, g, or t
  misc_feature (1034)..(1034): n is a, c, g, or t
  misc_feature (1040)..(1040): n is a, c, g, or t
  misc_feature (1054)..(1054): n is a, c, g, or t
  misc_feature (1057)..(1057): n is a, c, g, or t
  misc_feature (1061)..(1061): n is a, c, g, or t
  misc_feature (1065)..(1065): n is a, c, g, or t
  misc_feature (1067)..(1067): n is a, c, g, or t
  misc_feature (1070)..(1070): n is a, c, g, or t
  misc_feature (1072)..(1072): n is a, c, g, or t
  misc_feature (1081)..(1081): n is a, c, g, or t
  misc_feature (1084)..(1084): n is a, c, g, or t
  misc_feature (1094)..(1094): n is a, c, g, or t
  misc_feature (1097)..(1097): n is a, c, g, or t
  misc_feature (1102)..(1102): n is a, c, g, or t
  misc_feature (1116)..(1116): n is a, c, g, or t
  misc_feature (1118)..(1118): n is a, c, g, or t
  misc_feature (1124)..(1124): n is a, c, g, or t
gagaaattaactatgagaggatcgcatcaccatcaccatcacggatcctatttaggtgacactatagaatcgtcgacccacgcgtccgtcttgatctcttgacgtcatgatccgcctgtctcaacctcccaaagtgctgggattacaggtgtgatccaccatgcccagcctcatccttcttgaatagcaatgatcactctgtgttttaagtcactctcattaaactgagctcctaaagacaaggactgccctgtatttgcttttgcacatggagcatgccattggccttgcccacataatctttttgttccatcagcaggcagctttgtcgagaattttgttttatctgcagacattaagatattgtttggtcatctctgtagtggaatatgtcagctccttgtcataaggccattccactctatggaatgaggcagctgtaccagaggctgagaaaaatgagcagtattgttcaagttctgtcaccttcctgcctgagagaggagcaagacctgaaagaaagtctttgctttgtagatgctatctgtgagcagcagttgataatgtgcataaaatctgggaacaggccagatgtggatgacatcactgagtactgcccaagagaaattatcagtctcatgaagctctgctgggaagcgaatccggaagctcggccgacatttcctggcattgaagaaaaatttaggcctttttatttaagtcaattagaagaaagtgtagaagaggacgtgaagagtttaaagaaagagtattcaaacgaaaatgcagttgtgaagagaatgcagtctcttcaacttgattgtgtggcagtaccttcaagccggtcaaattcagccacagaacagcctggttcactgcacagttcccnagggnacttgggatgggtcctgtggaaggantcctggnttggctccntcccntgganccacccccnaanaananaangaagcccagccnggcaaantaaactccaagaangaagcccaactaccatctttnatggcanccccnanggaaanggcaaacaaaacancancccnaaananaangnggcttaacnccnaaaaggaggnaanggaancccggggtcccccnangaaccntt

SEQ ID NO: 4 - DNA, 1113 bp, Homo Sapiens
  misc_feature (1)..(1): n is a, c, g, or t
  misc_feature (801)..(801): n is a, c, g, or t
  misc_feature (879)..(879): n is a, c, g, or t
  misc_feature (906)..(906): n is a, c, g, or t
  misc_feature (913)..(913): n is a, c, g, or t
  misc_feature (923)..(923): n is a, c, g, or t
  misc_feature (930)..(930): n is a, c, g, or t
  misc_feature (933)..(933): n is a, c, g, or t
  misc_feature (935)..(935): n is a, c, g, or t
  misc_feature (954)..(954): n is a, c, g, or t
  misc_feature (979)..(979): n is a, c, g, or t
  misc_feature (985)..(985): n is a, c, g, or t
  misc_feature (991)..(991): n is a, c, g, or t
  misc_feature (995)..(995): n is a, c, g, or t
  misc_feature (998)..(998): n is a, c, g, or t
  misc_feature (1001)..(1001): n is a, c, g, or t
  misc_feature (1019)..(1020): n is a, c, g, or t
  misc_feature (1023)..(1024): n is a, c, g, or t
  misc_feature (1030)..(1030): n is a, c, g, or t
  misc_feature (1055)..(1055): n is a, c, g, or t
  misc_feature (1063)..(1063): n is a, c, g, or t
  misc_feature (1070)..(1070): n is a, c, g, or t
  misc_feature (1076)..(1076): n is a, c, g, or t
  misc_feature (1078)..(1078): n is a, c, g, or t
  misc_feature (1084)..(1084): n is a, c, g, or t
  misc_feature (1092)..(1094): n is a, c, g, or t
  misc_feature (1103)..(1105): n is a, c, g, or t
naaatagagaaattactatgagaggatcgcatcaccatcaccatcacggatcctatttaggtgacactatagaatcgtcgacccacgcgtccgcccacgcgtccgggaagacccctggaaagaaaacaattgtgaagtgtgcagtgaaccagcgacaagtggtgattgccctgacaggaggagagctggtctatttcgagatggatccttcaggacagctgaatgagtacacagaacggaaggagatgtcagcagatgtggtgtgcatgagtctggccaatgtaccccctggagagcagcggtctcgcttcctggctgtggggcttgtggacaacactgtcagaatcatctccctggatccctcagactgtttgcaacctctaagcatgcaggctctcccagcccagcctgagtccttgtgtatcgtggaaatgggtgggactgagaagcaggatgagctgggtgagaggggctcgattggcttcctatacctgaatattgggctacagaacggtgtgctgctgaggactgtcttggaccctgtcactggggatttgtctgatactcgcactcggtacctggggtcccgtcctgtgaagctcttccgagtccgaatgcaaggccaggaggcagtattggccatgtcaagccgctcatggttgagctattcttaccaatctcgcttccatctcaccccactgtcttacgagacactggaatttgcatcgggttttgcctcggaacagtgtcccgagggcattgtggccatctccaccaacaccctacggattttggcattanagaagctcggtgctgtcttcaatcaagtagccttcccactgcagtacacacccaggaaatttgtcatccacccctganagtaacaaacctttattatcattgaancgaaccncaatgcctanactgagnccncnaaagcttcaaaaaaagcancaaatggccaaagaaatggtggaancaccangggaanaatnacnggnacctgcccccaaaaatgnnacnncattcntcaatgaaaacctcccctgaatccntcttgganctcccangctggnantggcangggccccnnnaacccaggnnnaacccctt

SEQ ID NO: 5 - DNA, 1061 bp, Homo Sapiens
  misc_feature (709)..(709): n is a, c, g, or t
  misc_feature (787)..(787): n is a, c, g, or t
  misc_feature (789)..(789): n is a, c, g, or t
  misc_feature (797)..(797): n is a, c, g, or t
  misc_feature (814)..(814): n is a, c, g, or t
  misc_feature (822)..(822): n is a, c, g, or t
  misc_feature (824)..(824): n is a, c, g, or t
  misc_feature (830)..(830): n is a, c, g, or t
  misc_feature (836)..(836): n is a, c, g, or t
  misc_feature (845)..(845): n is a, c, g, or t
  misc_feature (848)..(849): n is a, c, g, or t
  misc_feature (855)..(855): n is a, c, g, or t
  misc_feature (860)..(860): n is a, c, g, or t
  misc_feature (862)..(862): n is a, c, g, or t
  misc_feature (872)..(872): n is a, c, g, or t
  misc_feature (877)..(877): n is a, c, g, or t
  misc_feature (887)..(887): n is a, c, g, or t
  misc_feature (897)..(897): n is a, c, g, or t
  misc_feature (903)..(903): n is a, c, g, or t
  misc_feature (911)..(911): n is a, c, g, or t
  misc_feature (914)..(915): n is a, c, g, or t
  misc_feature (921)..(921): n is a, c, g, or t
  misc_feature (932)..(932): n is a, c, g, or t
  misc_feature (935)..(935): n is a, c, g, or t
  misc_feature (937)..(937): n is a, c, g, or t
  misc_feature (945)..(945): n is a, c, g, or t
  misc_feature (951)..(951): n is a, c, g, or t
  misc_feature (954)..(954): n is a, c, g, or t
  misc_feature (960)..(960): n is a, c, g, or t
  misc_feature (977)..(978): n is a, c, g, or t
  misc_feature (984)..(984): n is a, c, g, or t
  misc_feature (986)..(986): n is a, c, g, or t
  misc_feature (994)..(994): n is a, c, g, or t
  misc_feature (997)..(997): n is a, c, g, or t
  misc_feature (1002)..(1002): n is a, c, g, or t
  misc_feature (1010)..(1010): n is a, c, g, or t
  misc_feature (1017)..(1017): n is a, c, g, or t
  misc_feature (1019)..(1019): n is a, c, g, or t
  misc_feature (1024)..(1024): n is a, c, g, or t
  misc_feature (1035)..(1035): n is a, c, g, or t
  misc_feature (1052)..(1052): n is a, c, g, or t
  misc_feature (1055)..(1055): n is a, c, g, or t
  misc_feature (1060)..(1060): n is a, c, g, or t
agaaattactatgaagaggatcgcatcaccatcaccatcacggatcctatttaggtgacactatagaatcgtcgacccacgcgtccgtgcccgggctgcagcctcgctgccaccgggagcctcctccgtcgctgaggagtcctccagagacggcaccggagcccgccgggccggagctggacgtcgaggccgctgcagacgaggaagccgcgacgctcgcggagccggggccgcagccctgccttcacatctccattgcaggctcgggcttggagatgacgccgggcctcggcgagggtgacccccgcccagagctggtgccctttgacagtgactctgacgatgagtcttcgcccagcccctcggggacgctgcagagccaggccagccggtccaccatctcctccagctttggcaatgaggagaccccgagttccaaggaggccacggcagagaccaccagctcagaggaggagcaggagccaggcttcctgccactgtctggctcctttgggcctggtggtccctgcggcaccagcccaatggatgggagagcccttcgccgctccagccacggctccttcacccggggcagccttgaggacctgctgagtgtcgaccctgaggcctaccagagctccgtgtggctgggcactgaggatggctgtgtccacgtgtaccagtcctccgacagcatccgtgaccgcangaacagcatgaagctccagcatgcggcctctgtgacctgcatcttgtatctgaataaccaggtgtttgtgtctctggncnatggaaancttgtggtctaccaaanggaaacangncatttntggganccccaaaanttnnaatcantgacntngggcacccanggganccccatcacnaaatggtatntgtggntggcgctntgnntggctnccaaaaccaantcntnttcttgancctganacnctgcanctggaacaatgttttanntgggtnangaatcaanccnctgcntggcttgnatggggnantccancctgggggtgngggtgaaatttaaaagnaangcccnc

SEQ ID NO: 6 - DNA, 1210 bp, Homo Sapiens
  misc_feature (901)..(901): n is a, c, g, or t
  misc_feature (959)..(959): n is a, c, g, or t
  misc_feature (972)..(972): n is a, c, g, or t
  misc_feature (1026)..(1026): n is a, c, g, or t
  misc_feature (1037)..(1037): n is a, c, g, or t
  misc_feature (1041)..(1041): n is a, c, g, or t
  misc_feature (1044)..(1045): n is a, c, g, or t
  misc_feature (1059)..(1059): n is a, c, g, or t
  misc_feature (1061)..(1061): n is a, c, g, or t
  misc_feature (1065)..(1065): n is a, c, g, or t
  misc_feature (1076)..(1076): n is a, c, g, or t
  misc_feature (1078)..(1078): n is a, c, g, or t
  misc_feature (1086)..(1087): n is a, c, g, or t
  misc_feature (1091)..(1091): n is a, c, g, or t
  misc_feature (1095)..(1095): n is a, c, g, or t
  misc_feature (1109)..(1109): n is a, c, g, or t
  misc_feature (1117)..(1117): n is a, c, g, or t
  misc_feature (1123)..(1123): n is a, c, g, or t
  misc_feature (1129)..(1129): n is a, c, g, or t
  misc_feature (1133)..(1133): n is a, c, g, or t
  misc_feature (1135)..(1136): n is a, c, g, or t
  misc_feature (1139)..(1139): n is a, c, g, or t
  misc_feature (1144)..(1144): n is a, c, g, or t
  misc_feature (1146)..(1146): n is a, c, g, or t
  misc_feature (1162)..(1162): n is a, c, g, or t
  misc_feature (1167)..(1167): n is a, c, g, or t
  misc_feature (1171)..(1171): n is a, c, g, or t
  misc_feature (1174)..(1174): n is a, c, g, or t
  misc_feature (1179)..(1179): n is a, c, g, or t
  misc_feature (1197)..(1197): n is a, c, g, or t
  misc_feature (1201)..(1201): n is a, c, g, or t
  misc_feature (1204)..(1204): n is a, c, g, or t
gagaaattactatgagaggatcgcatcaccatcaccatcacggatcctatttaggtgacactatagaatcgtcgacccacgcgtccggacaaacagagcggtcgcggcggcgactctcggcgtgcggtgatagccaagccatgggagacaagaagagccccaccaggccgaagcggcagccgaagccgtcctcggatgagggttactgggactgtagcgtctgcaccttccggaacagcgccgaggccttcaagtgcatgatgtgcgatgtgcggaagggcacctccacccggaaacctcgacctgtctcccagttggttgcacagcaggttactcagcagtttgtgcctcctacacagtcaaagaaagagaaaaaagataaagtagaaaaagaaaaaagtgaaaaggaaacaactagcaaaaagaatagccataagaaaaccaggccaagattgaaaaatgtggatcggagtagtgctcagcatttggaagttactgttggagatctgacagtcattattacagactttaaggagaaaacaaagtcaccgcctgcatctagtgctgcttctgcagatcaacacagtcaaagcggctctagctctgataacacagagagaggaatgtccaggtcatcttcacccagaggagaagcctcatcattgaatggagaatctcattaaagtttattttctccaatttcttagtcacttctgtcctaccatgcaaatacacagattatgccaagaggtaccacattttcatgacagatacattcatgcacaatccataatttgagttttacataaaatagaaatttgttagaatttgttagattttattgcaatgatgcctaccaaacatttccagacttaacattttggtctctgcagttaagtgnccatgaaaatgtggttgaattattcattatgcagtggttattggtaagtgtattttcnctttttagtttantgaattctaacacataattcttgaattctctactattggcatgtaacgaatttnaatttttttanaacntanngcaagctgcctaantntgtnttatttgaaantngtgaaacnnaaantttnttgtttacaagtcnaaaaacancttaanttttgntgcnannggnttttncntaagggtttccccttnaaaancccngcnggganttgggggggttaaaaagnaaanttnttttaa

SEQ ID NO: 7 - DNA, 877 bp, Homo Sapiens
  misc_feature (2)..(2): n is a, c, g, or t
  misc_feature (709)..(709): n is a, c, g, or t
  misc_feature (714)..(714): n is a, c, g, or t
  misc_feature (717)..(717): n is a, c, g, or t
  misc_feature (719)..(719): n is a, c, g, or t
  misc_feature (760)..(760): n is a, c, g, or t
  misc_feature (776)..(776): n is a, c, g, or t
  misc_feature (795)..(795): n is a, c, g, or t
  misc_feature (804)..(804): n is a, c, g, or t
  misc_feature (806)..(806): n is a, c, g, or t
  misc_feature (809)..(809): n is a, c, g, or t
  misc_feature (827)..(827): n is a, c, g, or t
  misc_feature (830)..(830): n is a, c, g, or t
  misc_feature (842)..(843): n is a, c, g, or t
  misc_feature (851)..(852): n is a, c, g, or t
  misc_feature (857)..(857): n is a, c, g, or t
  misc_feature (861)..(861): n is a, c, g, or t
  misc_feature (864)..(865): n is a, c, g, or t
  misc_feature (867)..(868): n is a, c, g, or t
  misc_feature (871)..(871): n is a, c, g, or t
  misc_feature (873)..(877): n is a, c, g, or t
antagagaaattactatgagaggatcgcatcaccatcaccatcacggatcctatttaggtgacactatagaatcgtcgacccacgcgtccggtgctgcgccctgctcctctcgctgtgggcgctgtgcacagcctgccgcaggcccgaggacgctgtagcccccaggaagagggcgcggaggcagcgggcgaggctgcagggcagtgcgacggcggcggaagcgcaagtcggacaccagactgcacgagctgcaccggggcccgcgcagcagcagggccctgcggcctgccagcatggatctcctgcgcccacactggctggaggtgtccagggacatcaccggaccgcaggcagccccctctgccttcccacaccaggagctgccccgggctctgccggcagctgcagccaccgcagggtgcgctggcctcgaggccacctattccaacgtggggctggcggcccttcccggggtcagcctggcggccagccctgtggtggccgagtatgcccgcgtccagaagcgcaaagggacccatcgcagtccccaagagccacagcaggggaagactgaggtgaccccggccgctcaggtggacgtcctgtactccagggtctgcaagcctaaaaggagggacccaggacccaccacagacccgctggaccccaagggccagggagcgattctggccctggcgggtgacctgncctancanancctcccgctcagggccctggatgtggacagcggccccctgnaaaacgtgtatgaaancatccgggaactgggggancctgctggnangancacacgtgcggggctggnacnccccctgcttcnnctgcccannctaangganggnntnnaanannnnn

SEQ ID NO: 8 - DNA, 1002 bp, Homo Sapiens
  misc_feature (801)..(801): n is a, c, g, or t
  misc_feature (826)..(826): n is a, c, g, or t
  misc_feature (945)..(945): n is a, c, g, or t
  misc_feature (971)..(971): n is a, c, g, or t
  misc_feature (974)..(974): n is a, c, g, or t
  misc_feature (976)..(976): n is a, c, g, or t
  misc_feature (978)..(978): n is a, c, g, or t
  misc_feature (983)..(984): n is a, c, g, or t
  misc_feature (986)..(986): n is a, c, g, or t
  misc_feature (990)..(990): n is a, c, g, or t
  misc_feature (992)..(994): n is a, c, g, or t
  misc_feature (996)..(998): n is a, c, g, or t
  misc_feature (1000)..(1000): n is a, c, g, or t
  misc_feature (1002)..(1002): n is a, c, g, or t
tagagaaaaattactatgagaggatcgcatcaccatcaccatcacgggatcctatttagggtgacactatagaatcgtcgacccacgcgctccggacgagaacaaatttgtggacgagcaggaggaggcggcggcggcggcggcggagccaggcccggacccgagcgaggtggacgggctcctgcggcaaggggacatgcttcgggcattccatgcagccttgcggaactctcccgtcaacaccaagaatcaagctgtgaaggagcgagcccagggcgtggtgctgaaagtgctcacaaacttcaagagcagtgagattgagcaggctgtgcagtcactggacagaaacggcgttgacttgttaatgaagtacatttataaaggctttgagaagcccacagaaaatagcagcgcagtgttactccagtggcacgaaaaggccttagcagtaggaggactaggctccattataagagttcttacagcaagaaagactgtttaaaaaaaataaaaagactcatgttaccttgagaagaattctggatgcccaggctggtgaagaagggattgacaatggaccatcttcctaggaactcccaagtaaactatttcaggacatgtatctgctgaaatgtattttattttcaaggtggaggggaaaatcgtctgtttcctaaatcctgtttaggatctgatagtctatgcctttgtctccgagtactgcagaactgacattttgacggtctaccagcgtggcggctggtgttggtcaaatgcacctgtgtgcactggggggagggnatggtttgggcaggtgcaaatccangggctgtggtaaacgggagagcttgtgtttttgaagtggaaaaaaaccccaagagtttgtacagacatcctgtcttccccagagaaggtggaccctcttggggctcattgtaaaatgcntgctgcatcaataaagctcttggctnatnantnttttnnanaaanannnannnanan

SEQ ID NO: 9 - DNA, 1164 bp, Homo Sapiens
  misc_feature (2)..(2): n is a, c, g, or t
  misc_feature (4)..(12): n is a, c, g, or t
  misc_feature (958)..(958): n is a, c, g, or t
  misc_feature (961)..(961): n is a, c, g, or t
  misc_feature (964)..(964): n is a, c, g, or t
  misc_feature (967)..(967): n is a, c, g, or t
  misc_feature (974)..(974): n is a, c, g, or t
  misc_feature (998)..(998): n is a, c, g, or t
  misc_feature (1012)..(1012): n is a, c, g, or t
  misc_feature (1016)..(1016): n is a, c, g, or t
  misc_feature (1026)..(1026): n is a, c, g, or t
  misc_feature (1032)..(1032): n is a, c, g, or t
  misc_feature (1056)..(1056): n is a, c, g, or t
  misc_feature (1061)..(1061): n is a, c, g, or t
  misc_feature (1068)..(1068): n is a, c, g, or t
  misc_feature (1070)..(1070): n is a, c, g, or t
  misc_feature (1074)..(1074): n is a, c, g, or t
  misc_feature (1094)..(1094): n is a, c, g, or t
  misc_feature (1100)..(1100): n is a, c, g, or t
  misc_feature (1116)..(1116): n is a, c, g, or t
  misc_feature (1120)..(1120): n is a, c, g, or t
  misc_feature (1127)..(1127): n is a, c, g, or t
  misc_feature (1129)..(1129): n is a, c, g, or t
  misc_feature (1133)..(1133): n is a, c, g, or t
  misc_feature (1138)..(1138): n is a, c, g, or t
  misc_feature (1142)..(1142): n is a, c, g, or t
  misc_feature (1157)..(1157): n is a, c, g, or t
  misc_feature (1161)..(1161): n is a, c, g, or t
cntnnnnnnnnnaatagagaaattactatgagaggatcgcatcaccatcaccatcacggatcctatttaggtgacactatagaatcgtcgacccacgcgtccggccacctgcactatgggagccttcccctgcccagcccagtggggatggtggtgagggcaggggtgctggggagctggctctgcctttccccacattctagccccgccagcaggcgaagcagggagatgtcagactgctacacggagctggagaaggcagtcattgtcctggtggaaaacttctacaaatatgtgtctaagtacagcctggtcaagaacaagatcagcaagagcagcttccgcgagatgctccagaaagagctgaaccacatgctgtcggacacagggaaccggaaggctgcggataagctcatccagaacctggatgccaatcatgatgggcgcatcagcttcgatgagtactggaccttgataggcggcatcaccggccccatcgccaaactcatccatgagcaggagcagcagagcagcagctagagacccctttggccacaccttccaggcactggcctgatgccccgccctggtgctctccccaggctccctcctcagcctcctgcccacccagggccctttactctcttctccctccagaccttcctctgacccttgctgaactggggtccctttgtgagtgtctcagtctagaggtacctccctccctggggggtctcagctcctggagtcgcaggcccttggggcccctctgtgagatctcaatgctgtctggggaccctaagagttttctcacctgttcagtctcatctaaccttccaatgtctgatgttcctgccaaattcctgcctgattctgggtccgtcctgacctccaaaggtcagcttggtgcttgaggtctccctgctcttggtggcagtggtagcagcaacagcagcancancancancacacancaaaaacctctccactttccttancccctctgctgggnaaanaggcactttncggganttcctccagctgcccttctttggnatganctaacangntgancccctctgttgctgaaaaangatgantaaagctggattgganttgnatccccngncccntggangccnttaaaccttcccccntggnaaa

SEQ ID NO: 10 - DNA, 733 bp, Homo Sapiens
  misc_feature (705)..(705): n is a, c, g, or t
  misc_feature (710)..(710): n is a, c, g, or t
  misc_feature (712)..(715): n is a, c, g, or t
  misc_feature (717)..(723): n is a, c, g, or t
  misc_feature (725)..(726): n is a, c, g, or t
  misc_feature (728)..(733): n is a, c, g, or t
atagagaaattactatgagaggatcgcatcaccatcaccatcacggatcctatttaggtgacactatagaatcgtcgacccacgcgtccgcgccgtgcgcccagccagccatggggaagatcaccctctacgaggaccggggcttccagggccgccactacgaatgcagcagcgaccaccccaacctgcagccctacttgagccgctgcaactcggcgcgcgtggacagcggctgctggatgctctatgagcagcccaactactcgggcctccagtacttcctgcgccgcggcgactatgccgaccaccagcagtggatgggcctcagcgactcggtccgctcctgccgcctcatcccccactctggctctcacaggatcagactctatgagagggaggactacagaggccagatgatagagttcactgaggactgctcctgtcttcaggaccgcttccgcttcaatgaaatccactccctcaacgtgctggagggctcctgggtcctctacgagctgtccaactaccgaggacggcagtacctgctgatgccaggggactataggcgctaccaggactggggggccacgaatgccagagtgggctctctgaggagagtcatagatttctcctgaaatatgtcctcctttgttgtttcttaatttggaaactaataaaatattttctgtgtgttcctggcaaaanaaaanannnnannnnnnnannannnnnn

SEQ ID NO: 11 - DNA, 1167 bp, Homo Sapiens
  misc_feature (3)..(3): n is a, c, g, or t
  misc_feature (862)..(862): n is a, c, g, or t
  misc_feature (922)..(922): n is a, c, g, or t
  misc_feature (927)..(927): n is a, c, g, or t
  misc_feature (1007)..(1007): n is a, c, g, or t
  misc_feature (1010)..(1010): n is a, c, g, or t
  misc_feature (1013)..(1013): n is a, c, g, or t
  misc_feature (1034)..(1034): n is a, c, g, or t
  misc_feature (1038)..(1038): n is a, c, g, or t
  misc_feature (1045)..(1045): n is a, c, g, or t
  misc_feature (1054)..(1054): n is a, c, g, or t
  misc_feature (1066)..(1066): n is a, c, g, or t
  misc_feature (1073)..(1073): n is a, c, g, or t
  misc_feature (1081)..(1082): n is a, c, g, or t
  misc_feature (1092)..(1092): n is a, c, g, or t
  misc_feature (1099)..(1099): n is a, c, g, or t
  misc_feature (1104)..(1104): n is a, c, g, or t
  misc_feature (1116)..(1116): n is a, c, g, or t
  misc_feature (1132)..(1132): n is a, c, g, or t
  misc_feature (1134)..(1134): n is a, c, g, or t
  misc_feature (1137)..(1137): n is a, c, g, or t
  misc_feature (1145)..(1146): n is a, c, g, or t
  misc_feature (1150)..(1150): n is a, c, g, or t
  misc_feature (1155)..(1155): n is a, c, g, or t
  misc_feature (1158)..(1158): n is a, c, g, or t
  misc_feature (1160)..(1160): n is a, c, g, or t
  misc_feature (1166)..(1167): n is a, c, g, or t
atnagagaaattactatgagaggatcgcatcaccatcaccatcacggatcctatttaggtgacactatagaatcgtcgacccacgcgtccggcttcgctgagcggctacagcggaatgagtcaggcctagactcagggcgctcccagcagctagccctgctcctgcgaaacgccacgcagcacacagctggctacttcggcagcgacgtcaaggtggcctaccagctggccacgcggctgctggcccacgagagcacccagcggggctttgggctgtctgccacacaggacgtgcacttcactgagaatctgctgcgggtgggcagcgccctcctggacacagccaacaagcggcactgggagctgatccagcagacagagggtggcaccgcctggctgctccagcactatgaggcctacgccagtgccctggcccagaacatgcggcacacctacctaagccccttcaccatcgtcacgcccaacattgtcatctccgtagtgcgcttggacaaagggaactttgctggggccaagctgccccgctacgaggccctgcgtggggagcagcccccggaccttgagacaacagtcattctgcctgagtctgtcttcagagagacgccccccgtggtcaggcccgcaggccccggagaggcccaggagccagaggagctggcacggcgacagcgacggcacccggagctgagccagggtgaggctgtggccagcgtcatcatctaccgcaccctggccgggctactgcctcataactatgaccctgacaagcgcagcttgagagtccccaaacgcccgatcatcaacacacccgtggtgagcatcagcgtccatgatgatgagnagcttctgccccgggccctggacaaacccgtcacggtgcagttccgcctgctggaaacanaagancggaacaagccccatctgtgtcttctggaaccattcaatcctggtcagtggcacaggtggctggtcggccaaaagctgtnaantcntcttccccaatgaaaaccacntcanctgccantgcaaccanatgaaaaacttncctttgntcatggannttttttcggnggaaaanggggnaaatcctgccantgaaaaaatgaaaaangnggntttagggnnaacnttggntgncntttggnn

SEQ ID NO: 12 - DNA, 938 bp, Homo Sapiens
  misc_feature (725)..(725): n is a, c, g, or t
  misc_feature (781)..(781): n is a, c, g, or t
  misc_feature (805)..(805): n is a, c, g, or t
  misc_feature (808)..(808): n is a, c, g, or t
  misc_feature (812)..(812): n is a, c, g, or t
  misc_feature (830)..(830): n is a, c, g, or t
  misc_feature (836)..(836): n is a, c, g, or t
  misc_feature (843)..(843): n is a, c, g, or t
  misc_feature (846)..(846): n is a, c, g, or t
  misc_feature (860)..(860): n is a, c, g, or t
  misc_feature (864)..(864): n is a, c, g, or t
  misc_feature (866)..(866): n is a, c, g, or t
  misc_feature (874)..(874): n is a, c, g, or t
  misc_feature (883)..(883): n is a, c, g, or t
  misc_feature (888)..(888): n is a, c, g, or t
  misc_feature (890)..(890): n is a, c, g, or t
  misc_feature (904)..(904): n is a, c, g, or t
  misc_feature (909)..(909): n is a, c, g, or t
  misc_feature (916)..(916): n is a, c, g, or t
  misc_feature (918)..(919): n is a, c, g, or t
  misc_feature (924)..(924): n is a, c, g, or t
  misc_feature (927)..(927): n is a, c, g, or t
  misc_feature (929)..(929): n is a, c, g, or t
  misc_feature (932)..(932): n is a, c, g, or t
  misc_feature (934)..(934): n is a, c, g, or t
  misc_feature (937)..(937): n is a, c, g, or t
agaaattaactatgagaggatcgcatcaccatcaccatcacggatcctatttaggtgacactatagaatcgtcgacccacgcgtccgcgggtctgcccgctgactgtggcccgcacgaccccagcctggcgccccctcctccgcctggtggctcgggggtgctgttccggggccctctgcaggagccgatgaggatgcccggagagggccacgtgcccgcgctgccttcaccgggcctgcagttcgggggcagtctgggaggcctgggtcagctgcagtcgcccggggcgggcgtggggctccccagcgctgcttcggagcgccggcccccgccgccggactttgctacgtctgcgctcgggggccagccgggctttccgtttggtgcagccggccggcagtccacgccgcacagcggtccaggcgtgaactcgccccccagcgcgggagggggcggtggcagctctggtggcggcggtggcgggggtgcctacccgccgcagcctgatttccagcccagccagcgcacctcggccagtaaattgggcgcgctctcgctgggctccttcaacaagcccagctccaaggacaacctgttcggccagagctgcctggctgcgctctccaccgcttgccagaacatgatcgccagcctcggggcccccaacctcaacgtgaccttcaacaagaagaacccgccagaaggcaagaggaaactgagccanaacgagaccgacggcgcggcagtggccggcaacccgggctcggaattacttcccangaaggactgctcctggggccccanganccgnaagcccgtccgggaacantaacancggctcnaancctcggggccgccnaacntncaacccanggggaaggnaccancntctccccaaataancctgnaatcacntnnggaangangnaancngtnt

SEQ ID NO: 13 - DNA, 1169 bp, Homo Sapiens
  misc_feature (895)..(895): n is a, c, g, or t
  misc_feature (910)..(910): n is a, c, g, or t
  misc_feature (941)..(941): n is a, c, g, or t
  misc_feature (952)..(952): n is a, c, g, or t
  misc_feature (961)..(961): n is a, c, g, or t
  misc_feature (969)..(969): n is a, c, g, or t
  misc_feature (980)..(981): n is a, c, g, or t
  misc_feature (999)..(999): n is a, c, g, or t
  misc_feature (1005)..(1005): n is a, c, g, or t
  misc_feature (1031)..(1031): n is a, c, g, or t
  misc_feature (1038)..(1038): n is a, c, g, or t
  misc_feature (1065)..(1065): n is a, c, g, or t
  misc_feature (1067)..(1068): n is a, c, g, or t
  misc_feature (1103)..(1103): n is a, c, g, or t
  misc_feature (1110)..(1110): n is a, c, g, or t
  misc_feature (1118)..(1118): n is a, c, g, or t
  misc_feature (1139)..(1139): n is a, c, g, or t
  misc_feature (1142)..(1142): n is a, c, g, or t
  misc_feature (1155)..(1155): n is a, c, g, or t
  misc_feature (1161)..(1161): n is a, c, g, or t
  misc_feature (1167)..(1168): n is a, c, g, or t
gattagagagaattactatgagaggatcgcatcaccatcaccatcacggatcctatttaggtgacactatagaatcgtcgacccacgcgtccggtgatttttgtctgattgcaatgtctggacgtggtaagcaaggaggcaaagctcgcgccaaagcgaaatcccgctcttctcgcgctggtctccagttcccggtgggccgagtgcaccgcctgctccgtaaaggcaactacgcagagcgggttggggcaggcgcgccggtgtacctggcggcggtgttagagtacctgaccgccgagatcctggagctggccggcaacgcggctcgcgacaacaagaagactcgcatcatcccgcgccacttgcagctggccatccgcaacgacgaggagctcaacaaactgctaggccgggtgaccattgctcagggcggcgtccttcctaacatccaggccgtgcttctgcctaagaagaccgagagtcaccacaaggccaagggcaagtgatttgacaggtatctgagctcccggaaacgctatcaaacccaaaggctcttttcagagcccccctaccgtttcaaaggaagagctaacctcactgcttgtaggtagaaggaaaaaaggcactaagaaaatgtcttctgaggctgatctggtgtctcacatctgtaatcccagcacttggggaggctgaggttgcaaaagcttctcatttcagagagatgccaggatcctaagtgcctgccaaacttaccaattctaaggaataagtggatggatggcattactgattcctacattactgattgattctgcatccgcaaattgttttattaaaacattctacatcatgtgtgggggagataaggaggataaaatgaagagaaagaatattnttgaggggaagttcnttctgaatacaaaatgtggtttaattttttnaaataaagtantaacattcncaggggtncaaactatttnnaagtaaagagattatttntaaagnaatccatccctcaacttacccagggnggccacnttttcttttttcttggggaacctgccnannattcattcctgctgaaaatcaatcaaaaaagaaangaaaacngggttttncttcccttttttcattcttgncanggaacaaaattgngaaaantttttnng

SEQ ID NO: 14 - DNA, 1172 bp, Homo Sapiens
  misc_feature (4)..(4): n is a, c, g, or t
  misc_feature (882)..(882): n is a, c, g, or t
  misc_feature (915)..(915): n is a, c, g, or t
  misc_feature (919)..(919): n is a, c, g, or t
  misc_feature (975)..(975): n is a, c, g, or t
  misc_feature (980)..(980): n is a, c, g, or t
  misc_feature (1035)..(1035): n is a, c, g, or t
  misc_feature (1038)..(1038): n is a, c, g, or t
  misc_feature (1058)..(1058): n is a, c, g, or t
  misc_feature (1060)..(1060): n is a, c, g, or t
  misc_feature (1064)..(1064): n is a, c, g, or t
  misc_feature (1078)..(1078): n is a, c, g, or t
  misc_feature (1097)..(1097): n is a, c, g, or t
  misc_feature (1103)..(1103): n is a, c, g, or t
  misc_feature (1105)..(1105): n is a, c, g, or t
  misc_feature (1110)..(1110): n is a, c, g, or t
  misc_feature (1130)..(1130): n is a, c, g, or t
  misc_feature (1137)..(1137): n is a, c, g, or t
  misc_feature (1139)..(1139): n is a, c, g, or t
  misc_feature (1149)..(1149): n is a, c, g, or t
  misc_feature (1153)..(1153): n is a, c, g, or t
  misc_feature (1162)..(1162): n is a, c, g, or t
  misc_feature (1170)..(1170): n is a, c, g, or t
  misc_feature (1172)..(1172): n is a, c, g, or t
gatngagagattactatgagaggatcgcatcaccatcaccatcacggatcctatttaggtgacactatagaatcgtcgacccacgcgtccggcgcgctgctgcggctgctgcgcacgggtgccccagccgctgcgtgcctgcggttggggaccagtgcagggaccgggtcgcgccgtgctatggccctgtaccacactgaggagcgcggccagccctgctcgcagaattaccgcctcttctttaagaatgtaactggtcactacatttccccctttcatgatattcctctgaaggtgaactctaaagaggaaaatggcattcctatgaagaaagcacgaaatgatgaatatgagaatctgtttaatatgattgtagaaatacctcggtggacaaatgctaaaatggagattgccaccaaggagccaatgaatcccattaaacaatatgtaaaggatggaaagctacgctatgtggcgaatatcttcccttacaagggttatatatggaattatggtaccctccctcagattctttcttgtggagaagttattcatgtgaagatccttggaattttggctcttattgatgaaggtgaaacagattggaaattaattgctatcaatgcgaatgatcctgaagcctcaaagtttcatgatattgatgatgttaagaagttcaaaccgggttacctggaagctactcttaattggtttagattatataaggtaccagatggaaaaccagaaaaccagtttgcttttaatggagaattcaaaaacaaggcttttgctcttgaagttattaaatccactcatcaatgttggaaagcattgcttatgaagaagtgtaatggaggagctataaattgcacaaacgtgcanatatctgatagccctttccgttgcactcaagangaancaagatcattagttgaatccggtatcatcttccccaaataaagaaaagtaatgaanaaaancaagtggggcacttccttggcaagtgattgaaacatctgaaattctgctgtcaanatncccatctctaaggactccananctcnttttcccccaaggnctaaaaaaaaggggggtcnaagaananttacngacttcccggtaaaacctcnttttttncnaactttttgncctntgcgaaatntaaataancn

SEQ ID NO: 15 - DNA, 1179 bp, Homo Sapiens
  misc_feature (2)..(2): n is a, c, g, or t
  misc_feature (911)..(911): n is a, c, g, or t
  misc_feature (914)..(914): n is a, c, g, or t
  misc_feature (964)..(964): n is a, c, g, or t
  misc_feature (978)..(978): n is a, c, g, or t
  misc_feature (983)..(983): n is a, c, g, or t
  misc_feature (1014)..(1014): n is a, c, g, or t
  misc_feature (1016)..(1016): n is a, c, g, or t
  misc_feature (1045)..(1045): n is a, c, g, or t
  misc_feature (1047)..(1047): n is a, c, g, or t
  misc_feature (1049)..(1049): n is a, c, g, or t
  misc_feature (1054)..(1054): n is a, c, g, or t
  misc_feature (1060)..(1060): n is a, c, g, or t
  misc_feature (1067)..(1067): n is a, c, g, or t
  misc_feature (1080)..(1080): n is a, c, g, or t
  misc_feature (1088)..(1088): n is a, c, g, or t
  misc_feature (1093)..(1093): n is a, c, g, or t
  misc_feature (1109)..(1109): n is a, c, g, or t
  misc_feature (1121)..(1121): n is a, c, g, or t
  misc_feature (1142)..(1142): n is a, c, g, or t
  misc_feature (1146)..(1146): n is a, c, g, or t
  misc_feature (1151)..(1151): n is a, c, g, or t
  misc_feature (1157)..(1157): n is a, c, g, or t
  misc_feature (1160)..(1160): n is a, c, g, or t
  misc_feature (1164)..(1164): n is a, c, g, or t
  misc_feature (1167)..(1167): n is a, c, g, or t
  misc_feature (1174)..(1174): n is a, c, g, or t
anattagagaaattactatgagaggatcgcatcaccatcaccatcacggatcctatttaggtgacactatagaatcgtcgacccacgcgtccgcgcacccggggctgtcgttcctgaaggaggcgtccgagttccactcgcgctacatcaccacggtcatccagcggatcttctacgccgtgaaccggtcctggtccggcaggatcacctgcgccgagctgcggaggagctccttcctgcagaatgtggcgctgctggaggaggaggcggacatcaaccagctgaccgaattcttctcgtacgagcatttctacgtcatctactgcaagttctgggagctggacacggaccacgacctgctcatcgacgcggacgacctggcgcggcacaatgaccacgccctttctaccaagatgatagacaggatcttctcaggagcagtcacacgaggcagaaaagtgcagaaggaagggaagatcagctatgccgactttgtctggtttttgatctctgaggaagacaaaaaaacaccgaccagcatcgagtactggttccgctgcatggacctggacggggacggcgccctgtccatgttcgagctcgagtacttctacgaggagcagtgccgaaggctggacagcatggccatcgaggccctgcccttccaggactgcctctgccagatgctggacctggtcaagccgaggactgaagggaagatcacgctgcaggacctgaagcgctgcaagctggccaacgtcttcttcgacaccttcttcaacatcgagaagtacctcgaccacgagcagaaagagcagatctccctgctcagggacggtgacagcggcggccccgagctctcggactgggaaaaatacgcggccgaagagtacgacatcctggtggccganganaccgcgggaaaacccctggggaggacgggttcgaggccgaactcagcccntgtggaaccaaaanctgantgcgctgccctccccgctggcccaaaggccntntttcgaggcgccctcaccgctgggcgccngngnactgntacaantaccccngccggggaaaaangaacctgnaaccnctttgaaccccccccncaaaaaaccccnccccggggcccctcccccggngccnccacngggccnccnggcncgngtaaaanttgtt

SEQ ID NO: 16 - DNA, 1179 bp, Homo Sapiens
  misc_feature (1)..(1): n is a, c, g, or t
  misc_feature (836)..(836): n is a, c, g, or t
  misc_feature (911)..(911): n is a, c, g, or t
  misc_feature (937)..(937): n is a, c, g, or t
  misc_feature (943)..(943): n is a, c, g, or t
  misc_feature (984)..(984): n is a, c, g, or t
  misc_feature (994)..(994): n is a, c, g, or t
  misc_feature (1010)..(1010): n is a, c, g, or t
  misc_feature (1022)..(1023): n is a, c, g, or t
  misc_feature (1027)..(1027): n is a, c, g, or t
  misc_feature (1031)..(1031): n is a, c, g, or t
  misc_feature (1041)..(1041): n is a, c, g, or t
  misc_feature (1070)..(1070): n is a, c, g, or t
  misc_feature (1072)..(1072): n is a, c, g, or t
  misc_feature (1077)..(1077): n is a, c, g, or t
  misc_feature (1088)..(1088): n is a, c, g, or t
  misc_feature (1091)..(1091): n is a, c, g, or t
  misc_feature (1098)..(1098): n is a, c, g, or t
  misc_feature (1102)..(1102): n is a, c, g, or t
  misc_feature (1114)..(1114): n is a, c, g, or t
  misc_feature (1119)..(1119): n is a, c, g, or t
  misc_feature (1129)..(1131): n is a, c, g, or t
  misc_feature (1138)..(1138): n is a, c, g, or t
  misc_feature (1142)..(1142): n is a, c, g, or t
  misc_feature (1150)..(1150): n is a, c, g, or t
  misc_feature (1155)..(1155): n is a, c, g, or t
  misc_feature (1158)..(1158): n is a, c, g, or t
  misc_feature (1164)..(1166): n is a, c, g, or t
  misc_feature (1168)..(1168): n is a, c, g, or t
naaattagagaaattactatgagaggatcgcatcaccatcaccatcacggatcctatttaggtgacactatagaatcgtcgacccacgcgtccgccgccaccgccgccgccgccgccgactcccgcgaccccgacgtcctcggcgtccaacctggacctgggcgagcagcgggagcgctgggagacgttccagaagcggcagaagcttacctccgagggtgccgccaagctcctgctagacacctttgaataccagggcctggtgaagcacacaggaggctgccactgtggagcagttcgttttgaagtttgggcctcagcagacttgcatatatttgactgcaagtaccggaattatatatgaataataagcacatacgatggaattactcaaatggagaactgaccaggctactaacaatagagtccagattggaaaagaagcactgtggaataacttgtgagaggattctgtgctaaattagaactttttcaaaggtggcctgaaaagaggggacttcagtttaattccagagatggtaattctggggacgtgttttacttggagctggacttcttgtgacgtggtgatgaagaaagagggaaacctaaacttccttgtccatttttggtgtggatgtctcagagacatcaggttgtagcagtgtctgaaatttgtttcctaagtgtctctgaagtccagcgcttctcttcactgtaaagaactgaggggtgggcagtacagacctgtctgttggtcctgtgttctgagcattgcagaacctcgactgctgacttgggacccccctgggctctgctgtacctgcaaaccagangcactgctatccaggcctttgccccagctcctcggccctggatggtgctgaaaggggcatcatctgtggggtcgnctggctctcatggctgggccgctcangcatanaagatgcaggtggctgctcacaaacctggaatttgctctgnctttctgtanttgcagcatttgcaanaaaaaaccaaannaaancttncattgttccngctttctcgccttcaagctcctgaagggnanctganccaattaacgnacnttaccgnttcnatattcccaaancccancatacttttnnnaaaaatngggngtttaaanctttnttnttcccnnnanaaaaccccgga

SEQ ID NO: 17 - DNA, 997 bp, Homo Sapiens
tgagaggatcgcatcaccatcaccatcacggatcctatttaggtgacactatagaatcgtcgacccacgcgtccgcccacgcgtccgcccacgcgtccgggagctgttgcttaagcttttgcctgatgactaacctggtgctgggattctacgaagatatgctcctttgttctgttcagtatttggcaatcacttcatccactactgcagtgcacccacccttgggcctggggggagggagtgggttgaaaaactgctcaagaaacagaagtttagcaagggtcatgaagaatactgcaagtgaaactgcagagagaggttacgtaggcagaaagcaagtcaacaaaagcacttagtcaggatccgtaacttgaaattgactcctttggaaattgccatagaacccttaatggacatcatcggctggacctgggatctgatgaatcccacaaaagtcagcaccttctacagaacagatgccctgatcaccaaggacttggtactgatttagagagaagagagcagctcctagcagcatcaacatctatttgtcgcttatttgccctgcagcaattcacctgcctttccttctcccatcctttttctggatatgccgcagaaggatccgtgccagaagcaagcctgtgagatacagaaatgtttacaagccaacagctacatggaatcaaagtgtcaggctgtcatccaagaactgcgtaagtgttgtgctcagtatcccaagggaagatctgtcgtctgttcaggatttgaaaaagaagaggaagaaaacctaacacggaagtctgcatcaagtaaagttcttctgaagtgctgctccatgtttccaccaaatgaattttttttatcctcctgactcttcaggccaggtagcagcaaatagcaatgaaaaagtcagctacaaaagttaatgaatatgccatctatgcagaacaggcagaaatataaacacattaaaagacaaatatgtagaatgtat

SEQ ID NO: 18 - DNA, 1179 bp, Homo Sapiens
  misc_feature (862)..(862): n is a, c, g, or t
  misc_feature (921)..(921): n is a, c, g, or t
  misc_feature (925)..(925): n is a, c, g, or t
  misc_feature (967)..(967): n is a, c, g, or t
  misc_feature (972)..(972): n is a, c, g, or t
  misc_feature (981)..(981): n is a, c, g, or t
  misc_feature (984)..(984): n is a, c, g, or t
  misc_feature (1010)..(1010): n is a, c, g, or t
  misc_feature (1017)..(1017): n is a, c, g, or t
  misc_feature (1020)..(1020): n is a, c, g, or t
  misc_feature (1032)..(1032): n is a, c, g, or t
  misc_feature (1034)..(1034): n is a, c, g, or t
  misc_feature (1037)..(1037): n is a, c, g, or t
  misc_feature (1048)..(1048): n is a, c, g, or t
  misc_feature (1050)..(1050): n is a, c, g, or t
  misc_feature (1071)..(1071): n is a, c, g, or t
  misc_feature (1081)..(1081): n is a, c, g, or t
  misc_feature (1083)..(1083): n is a, c, g, or t
  misc_feature (1086)..(1086): n is a, c, g, or t
  misc_feature (1092)..(1092): n is a, c, g, or t
  misc_feature (1101)..(1101): n is a, c, g, or t
  misc_feature (1105)..(1105): n is a, c, g, or t
  misc_feature (1108)..(1108): n is a, c, g, or t
  misc_feature (1115)..(1115): n is a, c, g, or t
  misc_feature (1130)..(1131): n is a, c, g, or t
  misc_feature (1135)..(1135): n is a, c, g, or t
  misc_feature (1137)..(1137): n is a, c, g, or t
  misc_feature (1164)..(1165): n is a, c, g, or t
  misc_feature (1167)..(1167): n is a, c, g, or t
  misc_feature (1176)..(1176): n is a, c, g, or t
  misc_feature (1179)..(1179): n is a, c, g, or t
agaaattactatgagaggatcgcatcaccatcaccatcacggatcctatttaggtgacactatagaatcgtcgacccacgcgtccgatcatttcagtcttaaaatccttgcacgtttgatgactgccaaattcttgcatacagaaattcgagaaaaaggcggtgcttatggtggaggcgcaaaactcagccacaatgggattttcaccctttactcttacagggacccaaatacaatagagacgctccagtcttttgggaaggctgtcgactgggctaagtctggaaaattcacacagcaagacatcgacgaagccaaactttctgtcttctcaaccgtagatgctcctgtcgctccttcagacaaaggtattttgagtataacagtgagaatctcaacccacagcctcacagatgacgttgctgttttccaagttcccggcatgcatgggcaggagcaccagcttctggtgcctccatccttgcttgtgatacgatttccacgtctgacaccctaaacacgcttcctgacatccgggcgagaagagtgcatcctgtcatttgttttactgacctgagacccagtggggccaacccatggcagtgtccgggctctttagggtggaaggaggacgtgggcacggcccgggcatggccacgttactctctggagccgcttttgctcacagcatcatcagcctcacgtggcgctgactgcatccctgctgcagaagcaggcgtgggtaggggtcagcgtggcacgtgggagctggagttcggggtgtgatctctgggttgttagacacatccctgtggttgaaacatgcacgtgaaatgacagtgagatgcctgtgtcccctccngggacatgagtgcacagcccacaacgcgagctcccgggcagcggctccatcgtgcctgnggantgtcttctaggaatggaccacttcttgtacggcctctcggangaaangaaacaagnccncaaaaaagcagctcttttgctgtcanccacganaancctcctggcccntnaancaaaaagtaantngggaacgggggaaaaaaaccntctgggaatngnaanccctcnggctgactntaanagncctcacncaaaaccagtcctcnntgananccctgccttccctttaggaacctcggnncnggaaaaaanaan

SEQ ID NO: 19 - DNA, 1179 bp, Homo Sapiens
  misc_feature (1)..(1): n is a, c, g, or t
  misc_feature (896)..(896): n is a, c, g, or t
  misc_feature (918)..(918): n is a, c, g, or t
  misc_feature (922)..(922): n is a, c, g, or t
  misc_feature (957)..(957): n is a, c, g, or t
  misc_feature (959)..(959): n is a, c, g, or t
  misc_feature (964)..(964): n is a, c, g, or t
  misc_feature (967)..(967): n is a, c, g, or t
  misc_feature (984)..(984): n is a, c, g, or t
  misc_feature (997)..(997): n is a, c, g, or t
  misc_feature (1007)..(1007): n is a, c, g, or t
  misc_feature (1009)..(1009): n is a, c, g, or t
  misc_feature (1030)..(1030): n is a, c, g, or t
  misc_feature (1037)..(1037): n is a, c, g, or t
  misc_feature (1065)..(1065): n is a, c, g, or t
  misc_feature (1089)..(1089): n is a, c, g, or t
  misc_feature (1091)..(1091): n is a, c, g, or t
  misc_feature (1097)..(1097): n is a, c, g, or t
  misc_feature (1100)..(1100): n is a, c, g, or t
  misc_feature (1110)..(1111): n is a, c, g, or t
  misc_feature (1113)..(1113): n is a, c, g, or t
  misc_feature (1117)..(1117): n is a, c, g, or t
  misc_feature (1135)..(1135): n is a, c, g, or t
  misc_feature (1143)..(1143): n is a, c, g, or t
  misc_feature (1147)..(1147): n is a, c, g, or t
  misc_feature (1156)..(1156): n is a, c, g, or t
  misc_feature (1170)..(1170): n is a, c, g, or t
  misc_feature (1175)..(1175): n is a, c, g, or t
nattagagagattactatgagaggatcgcatcaccatcaccatcacggatcctatttaggtgacactatagaatcgtcgacccacgcgtccggcgctgccgggggcgccgggactatgtcgcgggcgcggagccacctgcgcgccgctctattcctggcagcggcgtctgcgcgcggcgtaacgacccaggtcgcggcgcggcggggcttgagcgcgtggccggtgccgcaggagccgagcatggagtaccaggatgccgtgcgcatgctcaataccctgcagaccaatgccggctacctggagcaggtgaagcgccagcggggtgaccctcagacacagttggaagccatggaactgtacctggcacggagtgggctgcaggtggaggacttggaccggctgaacatcatccacgtcactgggacgaaggggaagggctccacctgtgccttcacggaatgtatcctccgaagctatggcctgaagacgggattctttagctctccccacctggtgcaggttcgggagcggatccgcatcaatgggcagcccatcagtcctgagctcttcaccaagtacttctggcgcctctaccaccggctggaggagaccaaggatggcagctgtgtctccatgcccccctacttccgcttcctgacactcatggccttccacgtcttcctccaagagaaggtggacctggcagtggtggaggtgggcattggcggggcttatgactgcaccaacatcatcaggaagcctgtggtgtgcggagtctcctctcttggcatcgaccacaccagcctcctgggggatacggtggagaagatcgcatggcaaaaagggggcatctttaagcaaggtgtccctgccttcactgtgctccaacctgaangtccctggcagtgctgaaggancgancccagcaaatctcatgtcctctatacctgtgtccnangctgnaanccctcaagaaagggggnccccccctgaccntgggccttgnanggggaacaccagcggttccanccccccnttggccttgcaactggcccattgctggntgcaacggcaagaacccccatggntnaatggncancttaaatggnnangcangtggggtggcacctgggnaacctgcntaanaaggttccngaaaaacttttttnccaancccc

SEQ ID NO: 20 - DNA, 1159 bp, Homo Sapiens
  misc_feature (883)..(883): n is a, c, g, or t
  misc_feature (889)..(889): n is a, c, g, or t
  misc_feature (962)..(962): n is a, c, g, or t
  misc_feature (966)..(966): n is a, c, g, or t
  misc_feature (974)..(974): n is a, c, g, or t
  misc_feature (982)..(983): n is a, c, g, or t
  misc_feature (986)..(986): n is a, c, g, or t
  misc_feature (990)..(990): n is a, c, g, or t
  misc_feature (1008)..(1008): n is a, c, g, or t
  misc_feature (1014)..(1014): n is a, c, g, or t
  misc_feature (1025)..(1025): n is a, c, g, or t
  misc_feature (1041)..(1041): n is a, c, g, or t
  misc_feature (1043)..(1043): n is a, c, g, or t
  misc_feature (1047)..(1047): n is a, c, g, or t
  misc_feature (1055)..(1055): n is a, c, g, or t
  misc_feature (1076)..(1076): n is a, c, g, or t
  misc_feature (1112)..(1112): n is a, c, g, or t
  misc_feature (1118)..(1118): n is a, c, g, or t
  misc_feature (1133)..(1133): n is a, c, g, or t
  misc_feature (1139)..(1139): n is a, c, g, or t
  misc_feature (1142)..(1144): n is a, c, g, or t
  misc_feature (1146)..(1146): n is a, c, g, or t
  misc_feature (1150)..(1150): n is a, c, g, or t
  misc_feature (1155)..(1155): n is a, c, g, or t
  misc_feature (1158)..(1158): n is a, c, g, or t
tagagaaattactatgagaggatcgcatcaccatcaccatcacggatcctatttaggtgacactatagaatcgtcgacccacgcgtccgcttcgggcttccacctcatttttttcgctttgcccattctgtttcagccagtcgccaagaatcatgaaagtcgccagtggcagcaccgccaccgccgccgcgggccccagctgcgcgctgaaggccggcaagacagcgagcggtgcgggcgaggtggtgcgctgtctgtctgagcagagcgtggccatctcgcgctgcgccgggggcgccggggcgcgcctgcctgccctgctggacgagcagcaggtaaacgtgctgctctacgacatgaacggctgttactcacgcctcaaggagctggtgcccaccctgccccagaaccgcaaggtgagcaaggtggagattctccagcacgtcatcgactacatcagggaccttcagttggagctgaactcggaatccgaagttggaacccccgggggccgagggctgccggtccgggctccgctcagcaccctcaacggcgagatcagcgccctgacggccgaggtgagatccagatccgaccactagatcatccttataccgacggggaaacggaggccagagagggcgtgggcgcttgcaccacttccgtcccatccttgcgggtacctggctatgcgggggtgcctaaggagcctggaaaaagcgctcccccgtcgtgcttcctggggaagggggcgttcgctgcgctcggagcggcgtcccttccaacccgccggtctcatttcttctcgttttcacaggcggcatgcgttcctgcggacgatcgcatcttgtgtcgctgaagcgcctcccccagggaccggcgnacccanccatccagggggcaaaagaattacgtgctctgtgggtctcccccaacgcgcctcgccggatctgagggaaaanaaancgatcggnggcactgnnccntaantgcatcagcctggggctnaagctnaagcactggcnaaaaaaggccctcctntntgcnccctatantcccaaaaatttagggggggnatccctcggggttttattttttgaaaacaaaatttnaaaaanggcccgttggggctnccaaanttnnnanaatnttttnttnt

SEQ ID NO: 21 - DNA, 816 bp, Homo Sapiens
taactatgagaggtcgcatcaccatcaccatcacggatcctatttaggtgacactatagaatcgtcgacccacgcgtccggcggtggcaacggccacggacacaaagggaaggcgaggaggcgagcaagaggctgggcctgcctccggcccgcgacccccgcccgccgcgcgcgcgcccgcccgctcccctcgccgcggtgtcccccacgccggctcgcaccctcgcgcgcacccttgcgcgcccgcgaccctcgcacgcgcccggacccgccgactccgtcccgagcgccgcgggcccgggcctggcggacgctgcgggtggggcggggatgctgacgggctgctccccggctcagcggcgcggctgctaggaggcaccgaggcagcggcggggctctgggcgcgcggctggatgcccccggcctgcggctccctgcgcttcccgccgtccaggggcaccagtcatgggcgccgcagccgctgaggcgccgctccggctgcctgccgcgcctccgctcgccttctgctgctacacgtcggtgcttctgctcttcgccttctctctgcccgggagccgcgcgtccaaccagcccccgggtggtggcggcggcagcggcggggactgtcccggcggcaaaggcaagagcatcaactgctcagaattaaatgtgagggagtctgacgtaagagtttgtgatgagtcatcatgtaaatatggaggagtctgtaaagaagatggagatggtttgaaatgtgcatgccaatttcagtgccatacaaattatattcctgtctgtggatcaatggggacactt

SEQ ID NO: 22 - DNA, 1053 bp, Homo Sapiens
  misc_feature (858)..(858): n is a, c, g, or t
  misc_feature (901)..(901): n is a, c, g, or t
  misc_feature (911)..(911): n is a, c, g, or t
  misc_feature (932)..(932): n is a, c, g, or t
  misc_feature (934)..(934): n is a, c, g, or t
  misc_feature (936)..(936): n is a, c, g, or t
  misc_feature (956)..(956): n is a, c, g, or t
  misc_feature (961)..(962): n is a, c, g, or t
  misc_feature (967)..(967): n is a, c, g, or t
  misc_feature (971)..(971): n is a, c, g, or t
  misc_feature (974)..(974): n is a, c, g, or t
  misc_feature (979)..(979): n is a, c, g, or t
  misc_feature (983)..(983): n is a, c, g, or t
  misc_feature (988)..(988): n is a, c, g, or t
  misc_feature (1007)..(1008): n is a, c, g, or t
  misc_feature (1012)..(1012): n is a, c, g, or t
  misc_feature (1016)..(1016): n is a, c, g, or t
  misc_feature (1019)..(1019): n is a, c, g, or t
  misc_feature (1026)..(1026): n is a, c, g, or t
  misc_feature (1028)..(1028): n is a, c, g, or t
  misc_feature (1038)..(1038): n is a, c, g, or t
  misc_feature (1041)..(1041): n is a, c, g, or t
  misc_feature (1053)..(1053): n is a, c, g, or t
tagagaaattactatgagaggatcgcatcaccatcaccatcacggatcctatttaggtgacactatagaatcgtcgacccacgcgtccgcggacgcgtgggcccagagccgaagccggcactgtgaggagctcctcccagggtccagcgcctgtgctggaaacagcagccagagccgcccctgcccctacagcgagattcccgtcatcctgccagcctccagcatggaggaggccaccggctgtgcaggtaaaagaaaccggccctacctcatgctgcggtcctcccagccctccggcaccccactccaaagtctggactctttccacatcctgctccagacagccaagctttgttggggtccccactgctttgagatggtgtgtagggtggtctgggcagttccctccatgccccccccagctaggaggccatcatcagtctgtacccaaggaagagtcatctgactctagaccctctggttgccacctctgacttgagccacagggtaccttgtgaaagaggtccccagtgacagcctccccagcctccctgtttcctttggctgtggcctcagagccctttccaggatgcctcagagcctcctgttgctgtttctgctcccagggaggcaggcaggagtctgtcctcttcacagtggccctcatcttactacctgcctctcttcccctagggttcaatctcatccacttggtggccacgggcatctcctgcttcttgggctctgggctcctgaccctagcagtgtacctgtcttgccagcactgccagcgtcagtcccaggagtccacactggtccatcctgccacccccaaccatttgcactacaagggcggangcaccccgaaaaatgaaaagtacacacccatggaattcaagancctgaacaanaataacttgatccctgatganananccaacttctacccattgcancaaannaatgngtanacnaatanttantaccnagccccctgaaaaaaaaanntttncggnccnaaggctnanctggaaaaanggngtttcccaaaan

SEQ ID NO: 23 - DNA, 1273 bp, Homo Sapiens
  misc_feature (1)..(1): n is a, c, g, or t
  misc_feature (904)..(904): n is a, c, g, or t
  misc_feature (931)..(931): n is a, c, g, or t
  misc_feature (934)..(934): n is a, c, g, or t
  misc_feature (954)..(954): n is a, c, g, or t
  misc_feature (965)..(965): n is a, c, g, or t
  misc_feature (967)..(967): n is a, c, g, or t
  misc_feature (969)..(969): n is a, c, g, or t
  misc_feature (975)..(975): n is a, c, g, or t
  misc_feature (1004)..(1004): n is a, c, g, or t
  misc_feature (1027)..(1027): n is a, c, g, or t
  misc_feature (1030)..(1030): n is a, c, g, or t
  misc_feature (1032)..(1032): n is a, c, g, or t
  misc_feature (1069)..(1069): n is a, c, g, or t
  misc_feature (1072)..(1072): n is a, c, g, or t
  misc_feature (1077)..(1077): n is a, c, g, or t
  misc_feature (1083)..(1083): n is a, c, g, or t
  misc_feature (1094)..(1094): n is a, c, g, or t
  misc_feature (1097)..(1097): n is a, c, g, or t
  misc_feature (1100)..(1100): n is a, c, g, or t
  misc_feature (1102)..(1102): n is a, c, g, or t
  misc_feature (1122)..(1122): n is a, c, g, or t
  misc_feature (1145)..(1146): n is a, c, g, or t
  misc_feature (1150)..(1150): n is a, c, g, or t
  misc_feature (1154)..(1154): n is a, c, g, or t
  misc_feature (1161)..(1161): n is a, c, g, or t
  misc_feature (1164)..(1164): n is a, c, g, or t
  misc_feature (1176)..(1176): n is a, c, g, or t
  misc_feature (1188)..(1188): n is a, c, g, or t
  misc_feature (1193)..(1193): n is a, c, g, or t
  misc_feature (1199)..(1199): n is a, c, g, or t
  misc_feature (1202)..(1202): n is a, c, g, or t
  misc_feature (1204)..(1204): n is a, c, g, or t
  misc_feature (1215)..(1215): n is a, c, g, or t
  misc_feature (1219)..(1220): n is a, c, g, or t
  misc_feature (1225)..(1225): n is a, c, g, or t
  misc_feature (1229)..(1229): n is a, c, g, or t
  misc_feature (1231)..(1232): n is a, c, g, or t
  misc_feature (1235)..(1235): n is a, c, g, or t
  misc_feature (1241)..(1241): n is a, c, g, or t
  misc_feature (1245)..(1245): n is a, c, g, or t
  misc_feature (1259)..(1259): n is a, c, g, or t
  misc_feature (1262)..(1262): n is a, c, g, or t
  misc_feature (1264)..(1264): n is a, c, g, or t
  misc_feature (1266)..(1266): n is a, c, g, or t
naattagagaaattactatgagaggatcgcatcaccatcaccatcacggatcctatttaggtgacactatagaatcgtcgacccacgcgtccgctcccgactctctgctcctttcccgccccagaagttcaagggcccccggcctcctgcgctcctgccgccgggaccctcgacctcctcagagcagccggctgccgccccgggaagatggcgaggaggagccgccaccgcctcctcctgctgctgctgcgctacctggtggtcgccctgggctatcataaggcctatgggttttctgccccaaaagaccaacaagtagtcacagcagtagagtaccaagaggctattttagcctgcaaaaccccaaagaagactgtttcctccagattagagtggaagaaactgggtcggagtgtctcctttgtctactatcaacagactcttcaaggtgattttaaaaatcgagctgagatgatagatttcaatatccggatcaaaaatgtgacaagaagtgatgcggggaaatatcgttgtgaagttagtgccccatctgagcaaggccaaaacctggaagaggatacagtcactctggaagtattagtggctccagcagttccatcatgtgaagtaccctcttctgctctgagtggaactgtggtagagctacgatgtcaagacaaagaagggaatccagctcctgaatacacatggtttaaggatggcatccgtttgctagaaaatcccagacttggctcccaaagcaccaacagctcatacacaatgaatacaaaaactggaactctgcaatttaatactgtttccaaactggacactggagaatattcctgtgaagcccgcaattctgttggatatcgcaggtgtcctgggaaacgaatgcaagtanatgatctcaacataagtggcatcatancanccgtatagttgtggccttantgattccgttngngncttggngatgctatgctcaaagaaaggctactttncaaaaaaacctccttccaaaaantantnttcttctaagccccgacatgagtgaaatgattcagcnccnaatcntttaanttaaaactccnttnaananaccaaaccccgttgtaccanttttaaatattaaaacttgcttnnccantttnaaaagtnccnagaaggattggntttttttatttngaaanaacccngantnttttaaaaaantttnncaccnaaanannggntttggngggnaataaaaaaaaaanttnangncgggttg

SEQ ID NO: 24 - DNA, 1227 bp, Homo Sapiens
  misc_feature (864)..(864): n is a, c, g, or t
  misc_feature (888)..(888): n is a, c, g, or t
  misc_feature (929)..(929): n is a, c, g, or t
  misc_feature (946)..(946): n is a, c, g, or t
  misc_feature (963)..(963): n is a, c, g, or t
  misc_feature (966)..(966): n is a, c, g, or t
  misc_feature (1026)..(1026): n is a, c, g, or t
  misc_feature (1034)..(1034): n is a, c, g, or t
  misc_feature (1039)..(1039): n is a, c, g, or t
  misc_feature (1052)..(1052): n is a, c, g, or t
  misc_feature (1073)..(1073): n is a, c, g, or t
  misc_feature (1113)..(1113): n is a, c, g, or t
  misc_feature (1117)..(1117): n is a, c, g, or t
  misc_feature (1120)..(1120): n is a, c, g, or t
  misc_feature (1126)..(1126): n is a, c, g, or t
  misc_feature (1130)..(1130): n is a, c, g, or t
  misc_feature (1139)..(1139): n is a, c, g, or t
  misc_feature (1149)..(1149): n is a, c, g, or t
  misc_feature (1161)..(1161): n is a, c, g, or t
  misc_feature (1175)..(1176): n is a, c, g, or t
  misc_feature (1193)..(1193): n is a, c, g, or t
  misc_feature (1208)..(1208): n is a, c, g, or t
  misc_feature (1210)..(1211): n is a, c, g, or t
  misc_feature (1213)..(1213): n is a, c, g, or t
  misc_feature (1217)..(1217): n is a, c, g, or t
  misc_feature (1219)..(1219): n is a, c, g, or t
  misc_feature (1222)..(1222): n is a, c, g, or t
agagaaattactatgagaggatcgcatcaccatcaccatcacggatcctatttaggtgacactatagaatcgtcgacccacgcgtccgctgcgttcggccgtcaggtccttgattggcaccgcctgatccccctcacctgggcctgtatggctaggcagactcctcatcttggagaacagagaaggacgacagcttctttgttgcgcaaactgactacagcctccaatggaggggtcattgaggagttatcttgtgttagatccaataactatgtgcaggaaccagagtgcaggaggaatcttgttcagtgcctccttgagaagcaggggactcctgtggtacaagggtccttggagctagagagggtcatgagttccctcctggacatgggtttcagcaatgcccatattaatgaattgctcagtgtacggcgaggtgccagtcttcaacagttgctggacatcatttcagaatttattctcttgggtctgaatccagagcctgtgtgtgtggtcttgaagaaaagtccccagttattgaaactgcctattatgcaaatgaggaagcgctccagttacctgcaaaagcttgggcttggagaagggaaattaaagagggtgctttactgttgccctgaaattttcaccatgcgccagcaggacattaacgacactgtcaggcttctcaaggagaagtgccttttcacggtacagcaagtcaccaagattttgcacagttgcccctctgttcttcgagaggacctgggtcaactggaatacaagtttcagtatgcatacttcaggatgggaattaagcatccagacattgtaaagacagcctcgtcttacagcgtgactgcaaanaaaaagacttttgttttgcaaaanaaaagcagctcggtgactccgtccacatcgccccagttgantcaaatggcagtggcantcctttgccagtggaanganttcctgctaaggggaggtgcaggaggactaatttattattgtgcaactgccagtcctgcncattccanctacnctaaacgccctgnccaaggcacgtaaaaaaacanaaacctgttttgaaatggcttgttacccaagggggccccncccntcngccccnccanaaaaaaaantgggaaggcncctaaaaggggnaagaaaaaaaaaannttttctaaggccaaccnaaaaatttctctttntnncngggnanttnttaaa

SEQ ID NO: 25 - DNA, 944 bp, Homo Sapiens
  misc_feature (853)..(853): n is a, c, g, or t
  misc_feature (856)..(856): n is a, c, g, or t
  misc_feature (862)..(862): n is a, c, g, or t
  misc_feature (885)..(885): n is a, c, g, or t
  misc_feature (903)..(903): n is a, c, g, or t
  misc_feature (910)..(910): n is a, c, g, or t
  misc_feature (922)..(927): n is a, c, g, or t
  misc_feature (929)..(933): n is a, c, g, or t
  misc_feature (935)..(944): n is a, c, g, or t
gaatagagaaattactatgagaggatcgcatcaccatcaccatcacggatcctatttaggtgacactatagaatcgtcgacccacgcgtccggtcgggctttacggcgccggatggctctggacgtgaagtctcgggcaaagcgttatgagaagctggacttccttggggagggacagtttgccaccgtttacaaggccagagataagaataccaaccaaattgtcgccattaagaaaatcaaacttggacatagatcagaagctaaagatggtataaatagaaccgccttaagagagataaaattattacaggagctaagtcatccaaatataattggtctccttgatgcttttggacataaatctaatattagccttgtctttgattttatggaaactgatctagaggtaagattaagattcctggagaaattcctttgtcccagtttatcaaacaagaacctaaatatttgttttctacccaagaagatactggtagtaaaagaaaaaaagcttaattttgttgaaatttggatgtactctgaggcaaaaggatctcgagttattttcttctaatcatttagtgatatccccagtgttacatacaaagatttggatttcattggcatttctgccttctaagttcccatagctagttgacgtcatttttggagaaatgagcattagacctataagatttgtttgcttttttttttttttgtgatggagtctcagtctgttcacccagcctggagtgcaatggcgtgatctgggctctctgcagccatcacctcctgggttccagtgattctctcacttcagcctcccaagtagctgggattacaggtgccnccncgcccngctaaattttatattttaagtanagacggggtgtcacctgngggcccngggctgggtttnnnnnncnnnnncnnnnnnnnnn

SEQ ID NO: 26 - DNA, 1287 bp, Homo Sapiens
  misc_feature (890)..(890): n is a, c, g, or t
  misc_feature (932)..(932): n is a, c, g, or t
  misc_feature (937)..(937): n is a, c, g, or t
  misc_feature (958)..(958): n is a, c, g, or t
  misc_feature (968)..(968): n is a, c, g, or t
  misc_feature (984)..(984): n is a, c, g, or t
  misc_feature (991)..(991): n is a, c, g, or t
  misc_feature (996)..(996): n is a, c, g, or t
  misc_feature (1002)..(1002): n is a, c, g, or t
  misc_feature (1004)..(1004): n is a, c, g, or t
  misc_feature (1007)..(1007): n is a, c, g, or t
  misc_feature (1011)..(1011): n is a, c, g, or t
  misc_feature (1030)..(1030): n is a, c, g, or t
  misc_feature (1065)..(1065): n is a, c, g, or t
  misc_feature (1077)..(1077): n is a, c, g, or t
  misc_feature (1090)..(1090): n is a, c, g, or t
  misc_feature (1126)..(1126): n is a, c, g, or t
  misc_feature (1130)..(1130): n is a, c, g, or t
  misc_feature (1138)..(1138): n is a, c, g, or t
  misc_feature (1143)..(1143): n is a, c, g, or t
  misc_feature (1153)..(1153): n is a, c, g, or t
  misc_feature (1191)..(1191): n is a, c, g, or t
  misc_feature (1195)..(1195): n is a, c, g, or t
  misc_feature (1201)..(1201): n is a, c, g, or t
  misc_feature (1207)..(1207): n is a, c, g, or t
  misc_feature (1211)..(1211): n is a, c, g, or t
  misc_feature (1213)..(1213): n is a, c, g, or t
  misc_feature (1224)..(1224): n is a, c, g, or t
  misc_feature (1230)..(1230): n is a, c, g, or t
  misc_feature (1257)..(1258): n is a, c, g, or t
  misc_feature (1286)..(1286): n is a, c, g, or t
tagagaaattactatgagaggatcgcatcaccatcaccatcacggatcctatttaggtgacactatagaatcgtcgacccacgcgtccggcggcggcgacggcagtaacagcggcagctacagcggggacgcgagcggggcggtgacggtgtgggaggtggtctcactcttgggaaaactgctgggcaccgtcgtcgcgctgaaggtggttctgtacctgctccgagtgtgcttagcgatggcctggaaatccggcggcgccagccactcggagctaatccacaatctccgcaaaaatggaatcatcaagacagataaagtatttgaagtgatgctggctacagaccgctcccactatgcaaaatgtaacccatacatggattctccacaatcaataggtttccaagcaacaatcagtgctccacacatgcatgcatatgcgctagaacttctatttgatcagttgcatgaaggagctaaagctcttgatgtaggatctggaagtggaatccttactgcatgttttgcacgtatggttggatgtactggaaaagtcataggaattgatcacattaaagagctagtagatgactcagtaaataatgtcaggaaggacgatccaacacttctgtcttcagggagagtacagcttgttgtgggggatggaagaatgggatatgctgaagaagccccttatgatgccattcatgtgggagctgcagcccctgttgtaccccaggcgctaatagatcagttaaagcccggaggaagattgatattgcctgttggtcctgcaggcggaaaccaaatgttggagcagtatgacaagctacaagatggcagcatcaaaatgaagcctctgatgggggtgatatacgtgcctttaacanataaaaaaagcagtggtccaggtggaagtgattttatcttcngctcntttcttcttccacacatgcangggatgaatngtaaaaccaacatcancttgacnagtanaaaatnanagnggantgcctcatcccaatccccnaagcttttttgaaaaccaaccccatcccagctttnttttggaacttngttaccctgtttnttttccccatgaaaatggggggttttttttaagggnttcnggattctncaaanagcccaaaancccaatttggtaaaagaaaggagccaaaaaaaaaattngggnaaaaanactttnaacngnccccaattttntttggnaaaattaaaaaaaagggtttttaaaanngaaaaattatttttgggaaatttttttna

SEQ ID NO: 27 - DNA, 1300 bp, Homo Sapiens
  misc_feature (856)..(856): n is a, c, g, or t
  misc_feature (868)..(868): n is a, c, g, or t
  misc_feature (887)..(887): n is a, c, g, or t
  misc_feature (908)..(908): n is a, c, g, or t
  misc_feature (914)..(914): n is a, c, g, or t
  misc_feature (918)..(918): n is a, c, g, or t
  misc_feature (933)..(933): n is a, c, g, or t
  misc_feature (953)..(953): n is a, c, g, or t
  misc_feature (957)..(957): n is a, c, g, or t
  misc_feature (970)..(970): n is a, c, g, or t
  misc_feature (982)..(982): n is a, c, g, or t
  misc_feature (984)..(984): n is a, c, g, or t
  misc_feature (986)..(986): n is a, c, g, or t
  misc_feature (1010)..(1010): n is a, c, g, or t
  misc_feature (1024)..(1024): n is a, c, g, or t
  misc_feature (1043)..(1043): n is a, c, g, or t
  misc_feature (1047)..(1048): n is a, c, g, or t
  misc_feature (1060)..(1060): n is a, c, g, or t
  misc_feature (1081)..(1081): n is a, c, g, or t
  misc_feature (1083)..(1083): n is a, c, g, or t
  misc_feature (1088)..(1088): n is a, c, g, or t
  misc_feature (1098)..(1098): n is a, c, g, or t
  misc_feature (1107)..(1107): n is a, c, g, or t
  misc_feature (1122)..(1122): n is a, c, g, or t
  misc_feature (1128)..(1128): n is a, c, g, or t
  misc_feature (1130)..(1130): n is a, c, g, or t
  misc_feature (1141)..(1141): n is a, c, g, or t
  misc_feature (1144)..(1144): n is a, c, g, or t
  misc_feature (1150)..(1150): n is a, c, g, or t
  misc_feature (1164)..(1165): n is a, c, g, or t
  misc_feature (1174)..(1174): n is a, c, g, or t
  misc_feature (1198)..(1200): n is a, c, g, or t
  misc_feature (1216)..(1216): n is a, c, g, or t
  misc_feature (1224)..(1224): n is a, c, g, or t
  misc_feature (1229)..(1230): n is a, c, g, or t
  misc_feature (1251)..(1251): n is a, c, g, or t
  misc_feature (1259)..(1260): n is a, c, g, or t
  misc_feature (1263)..(1263): n is a, c, g, or t
  misc_feature (1270)..(1270): n is a, c, g, or t
  misc_feature (1273)..(1274): n is a, c, g, or t
  misc_feature (1277)..(1277): n is a, c, g, or t
  misc_feature (1281)..(1281): n is a, c, g, or t
  misc_feature (1284)..(1284): n is a, c, g, or t
  misc_feature (1291)..(1292): n is a, c, g, or t
  misc_feature (1299)..(1300): n is a, c, g, or t
agagaaattactatgagaggatcgcatcaccatcaccatcacggatcctatttaggtgacactatagaatcgtcgacccacgcgtccgatcttggttctcctgaagatttcctctccaaagccttagatcctcctcagctccaagtgatcagcaatgcaatgaatttgctccgaaaaattggagcttgtgaattaaatgagcctaaactgactccgttgggccaacaccttgcagctttacctgtgaatgtcaagattggcaagatgcttatttttggtgccatatttggctgccttgacccagtggcaacactagctgcagttatgacagagaagtctccttttaccacaccaattggtcgaaaagatgaagcagatcttgcaaaatcagctttggccatggcggattcagaccacctgacgatctacaatgcatatctaggatggaagaaagcacgacaagaaggaggttatcgttctgaaatcacatactgccggaggaactttcttaatagaacatcactgttaaccctagaggatgtaaagcaggagttaataaagttggttaaggcagcaggattttcatcttccacaacttctaccagctgggaaggaaacagagcctcacagaccctctcattccaagaaattgcccttcttaaagctgtactggtggctggactgtatgacaatgtggggaagataatctatacaaagtcagtggatgttacagaaaaattggcttgcattgtggagacggcccaaggcaaagcacaagtacacccatcctcagtaaatcgagatttgcaaactcatggatggctcttataccaggagaagataaggtatgccagantgtatttgaganaaactaccctaaaaacccntttccagttttactttttggngggganatanaagttcagcaccganaacgtcttctttctatgganggcnggatctattttcnggcccctgtaanananctggcattttcaagcacctgaaanttcccatggattcngttttaaaaaaaagcttgnaaannccaaaatgtccntgaaaaaggaaaaaattccgncnaatcnttagggaatngaaaaaacngaaaaaactgaaacngaaatncngggccaccgcnttnaaaatnaaaaagaaaaaccnnccggaaatntctgaaaaggggcccccccttaannntttttttcttaaaagnggggcccnccctnnttaaggggggggaaaaaaccnaccttaannggnaaatttnccnnccntttnggnaaaatcnnaggggtnn

SEQ ID NO: 28 - DNA, 1148 bp, Homo Sapiens
  misc_feature (1)..(2): n is a, c, g, or t
  misc_feature (847)..(847): n is a, c, g, or t
  misc_feature (850)..(850): n is a, c, g, or t
  misc_feature (897)..(897): n is a, c, g, or t
  misc_feature (906)..(906): n is a, c, g, or t
  misc_feature (917)..(917): n is a, c, g, or t
  misc_feature (929)..(929): n is a, c, g, or t
  misc_feature (937)..(937): n is a, c, g, or t
  misc_feature (954)..(954): n is a, c, g, or t
  misc_feature (960)..(960): n is a, c, g, or t
  misc_feature (967)..(967): n is a, c, g, or t
  misc_feature (986)..(986): n is a, c, g, or t
  misc_feature (993)..(993): n is a, c, g, or t
  misc_feature (1003)..(1003): n is a, c, g, or t
  misc_feature (1009)..(1009): n is a, c, g, or t
  misc_feature (1013)..(1013): n is a, c, g, or t
  misc_feature (1015)..(1015): n is a, c, g, or t
  misc_feature (1021)..(1021): n is a, c, g, or t
  misc_feature (1025)..(1025): n is a, c, g, or t
  misc_feature (1038)..(1038): n is a, c, g, or t
  misc_feature (1046)..(1046): n is a, c, g, or t
  misc_feature (1049)..(1049): n is a, c, g, or t
  misc_feature (1052)..(1052): n is a, c, g, or t
  misc_feature (1073)..(1073): n is a, c, g, or t
  misc_feature (1086)..(1086): n is a, c, g, or t
  misc_feature (1101)..(1102): n is a, c, g, or t
  misc_feature (1105)..(1105): n is a, c, g, or t
  misc_feature (1113)..(1115): n is a, c, g, or t
  misc_feature (1120)..(1121): n is a, c, g, or t
  misc_feature (1124)..(1124): n is a, c, g, or t
  misc_feature (1136)..(1136): n is a, c, g, or t
  misc_feature (1147)..(1147): n is a, c, g, or t
nnattagagaaaattactatgagaggatcgcatcaccatcaccatcacggatcctatttaggtgacactatagaatcgtcgacccacgcgtccggaacaacagccccgccctgcccatcggcagtgtcagcgccacagacagagactcaggcaccaacgcccaggtcatctactccctgctgccgtcccaggacccgcacctgcccctcgcctccctggtctccatcaacgcggacaacggccacctgtttgccctcaggtccctggactacgaggccctgcaggcgttcgagttccgggtgggcgccacagaccgcggctcccccgcgctgagcagcgaggcgctggtgcgcgtgctggtgctggacgccaacgacaactcgcccttcgtgctgtacccgctgcagaacagctccgcgccctgcaccgagccgttgccccgggcggccgagccgggctacctggtgaccaaggtggtggcggtggacggcgactcgggccagaacgcctggctgtcgtaccagctgctcaaggccacggagcccgggctattcggcgtgtgggcgcacaatggcgaggtgcgtaccgccaggctgctgagcgagcgcgacgcagccaagcagaggctggtggtgctggtcaaggacaatggcgagcctccgcgctcggccaccgccacgctgcacgtgctcctggtggacggcttctcccagccctacctgcggctcccggaggcggccccggaccaggccaactcgctcaccgtctacctggtggtggcgttggcctcggtgtcttcgctcttcctcctctcggtgctcctgttcgtggcggtgcggctgtgcangangaactgggcggccccggtggggtcgctgctcggtgcctgagggcccntttcacganatctggtgganttgaacggcacngggaaccntatcccaaaactaccantatgangtgtgcntgattggaggctccggganaaatganttcaagtttntgaaancaantnatcccnaacntgctacccaaaanaaaggganggnaantggaaaaaaatcccccatttnaaaaaaatttggnttttgaaaaaaaatnnaantaaatccnnnttggnnaanacttttttgaanaaaaatttttng

SEQ ID NO: 29 - DNA, 1179 bp, Homo Sapiens
  misc_feature (856)..(856): n is a, c, g, or t
  misc_feature (899)..(899): n is a, c, g, or t
  misc_feature (921)..(921): n is a, c, g, or t
  misc_feature (991)..(991): n is a, c, g, or t
  misc_feature (1016)..(1016): n is a, c, g, or t
  misc_feature (1026)..(1026): n is a, c, g, or t
  misc_feature (1036)..(1036): n is a, c, g, or t
  misc_feature (1048)..(1048): n is a, c, g, or t
  misc_feature (1052)..(1054): n is a, c, g, or t
  misc_feature (1078)..(1078): n is a, c, g, or t
  misc_feature (1087)..(1087): n is a, c, g, or t
  misc_feature (1091)..(1091): n is a, c, g, or t
  misc_feature (1111)..(1111): n is a, c, g, or t
  misc_feature (1144)..(1144): n is a, c, g, or t
  misc_feature (1148)..(1149): n is a, c, g, or t
  misc_feature (1158)..(1158): n is a, c, g, or t
  misc_feature (1163)..(1163): n is a, c, g, or t
  misc_feature (1173)..(1173): n is a, c, g, or t
  misc_feature (1175)..(1175): n is a, c, g, or t
tagagaaattactatgagaggatcgcatcaccatcaccatcacggatcctatttaggtgacactatagaatcgtcgacccacgcgtccgagtgtatgtgtaagcacaacacagcaggcagccactgccagcactgtgccccgttatacaatgaccggccatgggaggcagctgatggcaaaacgggggctcccaacgagtgcagaacctgcaagtgtaatgggcatgctgatacctgtcacttcgacgttaatgtgtgggaggcatcagggaatcgtagtggtggtgtctgtgatgactgtcagcacaacacagaaggacagtattgccagaggtgcaagccaggcttctatcgtgacctgcggagacccttctcagctccagatgcttgcaaaccgtgttcctgccatccagtaggatcagctgtccttcctgccaactcagtgaccttctgcgaccccagcaatggtgactgcccttgcaagcctggggtggcagggcgacgttgtgacaggtgcatggtgggatactggggcttcggagactatggctgtcgaccatgtgactgtgcggggagctgtgaccctatcaccggagactgcatcagcagccacacagacatagactggtatcatgaagttcctgacttccgtcccgtgcacaataagagcgaaccagcctgggagtgggaggatgcgcaggggttttctgcacttctacactcaggtaaatgcgaatgtaaggaacagacattaggaaatgccaaggcattctgtggaatgaaatattcatatgtgctaaaaataaagattttatcagctcatgataaaggtactcatgttgaggtcaatgtgaanattaaaaaggtcttaaaatctaccaaactgaaaattttccgangaaaagcgaacattatatccanaatcatggacggacaaaggatgcccttgttccaatcctcaatcctgggtttggaaaaaccttgtaccagnacatgaaggaatttaaaaacaggcnaaactaattngtgaaaaatnaaaaagcttttntccnnncactggaaacccttttcctttggnaaaaaaaanttcntgggaaaatttttaaaaaanaaaagggcaagttaccctttaaaaatgggatancccnntaatgggcnctttnttcttttttncnaaaa

SEQ ID NO: 30 - DNA, 1178 bp, Homo Sapiens
  misc_feature (1)..(1): n is a, c, g, or t
  misc_feature (5)..(5): n is a, c, g, or t
  misc_feature (17)..(17): n is a, c, g, or t
  misc_feature (845)..(845): n is a, c, g, or t
  misc_feature (893)..(893): n is a, c, g, or t
  misc_feature (908)..(908): n is a, c, g, or t
  misc_feature (914)..(914): n is a, c, g, or t
  misc_feature (944)..(944): n is a, c, g, or t
  misc_feature (955)..(955): n is a, c, g, or t
  misc_feature (970)..(970): n is a, c, g, or t
  misc_feature (978)..(978): n is a, c, g, or t
  misc_feature (994)..(994): n is a, c, g, or t
  misc_feature (1001)..(1001): n is a, c, g, or t
  misc_feature (1017)..(1017): n is a, c, g, or t
  misc_feature (1020)..(1020): n is a, c, g, or t
  misc_feature (1024)..(1024): n is a, c, g, or t
  misc_feature (1030)..(1030): n is a, c, g, or t
  misc_feature (1040)..(1040): n is a, c, g, or t
  misc_feature (1049)..(1049): n is a, c, g, or t
  misc_feature (1053)..(1053): n is a, c, g, or t
  misc_feature (1055)..(1055): n is a, c, g, or t
  misc_feature (1069)..(1069): n is a, c, g, or t
  misc_feature (1072)..(1072): n is a, c, g, or t
  misc_feature (1081)..(1081): n is a, c, g, or t
  misc_feature (1092)..(1092): n is a, c, g, or t
  misc_feature (1097)..(1097): n is a, c, g, or t
  misc_feature (1099)..(1099): n is a, c, g, or t
  misc_feature (1103)..(1103): n is a, c, g, or t
  misc_feature (1110)..(1110): n is a, c, g, or t
  misc_feature (1115)..(1115): n is a, c, g, or t
  misc_feature (1121)..(1121): n is a, c, g, or t
  misc_feature (1125)..(1125): n is a, c, g, or t
  misc_feature (1129)..(1129): n is a, c, g, or t
  misc_feature (1135)..(1135): n is a, c, g, or t
  misc_feature (1138)..(1138): n is a, c, g, or t
  misc_feature (1144)..(1144): n is a, c, g, or t
  misc_feature (1147)..(1147): n is a, c, g, or t
  misc_feature (1160)..(1161): n is a, c, g, or t
  misc_feature (1169)..(1169): n is a, c, g, or t
naatnagagagaattanctatgagaggatcgcatcaccatcaccatcacggatcctatttaggtgacactatagaatcgtcgacccacgcgtccggcaacaatttcattggtggttacttctgctcctgccccccggaatatttcctccatgatgacatgaagaattgcggagttaattgcagtggggatgtattcactgcactgattggggagattgcaagtcccaattatcccaaaccatatccagagaactcaaggtgtgaataccagatccggttggagaaagggttccaagtggtggtgaccttgcggagagaagattttgatgtggaagcagctgactcagcgggaaactgccttgacagtttagtttttgttgcaggagatcggcaatttggtccttactgtggtcatggattccctgggcctctaaatattgaaaccaagagtaatgctcttgatatcatcttccaaactgatctaacagggcaaaaaaagggctggaaacttcgctatcatggagatccaatgccctgccctaaggaagacactcccaattctgtttgggagcctgcgaaggcaaaatatgtctttagagatgtggtgcagataacctgtctggatgggtttgaagttgtggagggacgtgttggtgcaacatctttctattcgacttgtcaaagcaatggaaagtggagtaattccaaactgaaatgtcaacctgtggactgtggcattcctgaatccattgagaatggtaaagttgaagacccagagagcactttgtttggttctgtcatccgctacacttgtgaggagccatattactacatggaaaatggangaaggtggggagtatcactgtgctggtaacgggagctgggtgaatgangtgctgggcccgganctgccnaaaatgtgttccagtctgtggagtccccanaaaaccctttngaagaaaaaccagangataaatngggaggatccgatgcnaatattnaaaacttccccctggnaangtcntctttnaaaaccccangggctgggnggancncctcattaatgaanacnggggtgctnacgcctgcccntgttntngganggaaacngggancccaanaagntttntggggnccncctcanggnaaaacccccgggnngggaaaancccaaaagg

SEQ ID NO: 31 - DNA, 871 bp, Homo Sapiens
atgagaggatcgcatcaccatcaccatcacggatcctatttaggtgacactatagaatcgtcgacccacgcgtccggccaggccttcgagcagctctgcctcttgcaggaagtccaacagcagctcaactccgaccatcggggcaaaatggagacactagagatcgacagaggctgtctctctctcaacctcagatccccaaacatctcgctgaaggttgaccccacacgtgtacctgatggctccaccacactccagcagtgggatgacttcagtcggttcaacaaggaccgagcggaggctgagatgaaggcagccacagagctgagggaggccactgctctaactattgctgagaccaacaacgagcttgaagcccagagagttgcaacggaatttgccttcaggaagcggctgcgggagatggagaaagtgtacagtgagctcaagtggcaagagaagaataccttggaggagatcgctgagctgcaggaggacatccggcacctggaggaggatctgcgcacaaagctcctgagcctgaagctgtcccatacccggctagaggccagaacctaccggcccaacgtggaactctgccgggaccaggcacagtacggcctcaccgacgaggttcaccagctagaggcaaccatcgctgccctgaagcagaagctggcgcaagcacaggacgcactggacgccctgtgcaagcacctggcccggctgcaggctgacattgcctgcaaggccaactccatgctgctggacaccaagtgcatggacacgcggcgcaagctgaccgtgcctgctgagaggttcgtgcctgaggtggacaccttcacacgtaccacaaatagcaccctgagtc

SEQ ID NO: 32 - DNA, 1179 bp, Homo Sapiens
  misc_feature (2)..(2): n is a, c, g, or t
  misc_feature (945)..(945): n is a, c, g, or t
  misc_feature (971)..(971): n is a, c, g, or t
  misc_feature (975)..(975): n is a, c, g, or t
  misc_feature (982)..(982): n is a, c, g, or t
  misc_feature (992)..(992): n is a, c, g, or t
  misc_feature (1014)..(1014): n is a, c, g, or t
  misc_feature (1022)..(1022): n is a, c, g, or t
  misc_feature (1024)..(1024): n is a, c, g, or t
  misc_feature (1050)..(1050): n is a, c, g, or t
  misc_feature (1058)..(1058): n is a, c, g, or t
  misc_feature (1060)..(1060): n is a, c, g, or t
  misc_feature (1063)..(1063): n is a, c, g, or t
  misc_feature (1076)..(1076): n is a, c, g, or t
  misc_feature (1078)..(1079): n is a, c, g, or t
  misc_feature (1083)..(1083): n is a, c, g, or t
  misc_feature (1088)..(1088): n is a, c, g, or t
  misc_feature (1097)..(1097): n is a, c, g, or t
  misc_feature (1111)..(1111): n is a, c, g, or t
  misc_feature (1113)..(1114): n is a, c, g, or t
  misc_feature (1123)..(1123): n is a, c, g, or t
  misc_feature (1125)..(1125): n is a, c, g, or t
  misc_feature (1134)..(1134): n is a, c, g, or t
  misc_feature (1150)..(1150): n is a, c, g, or t
  misc_feature (1170)..(1170): n is a, c, g, or t
  misc_feature (1177)..(1177): n is a, c, g, or t
anaatagagaaattactatgagaggatcgcatcaccatcaccatcacggatcctatttaggtgacactatagaatcgtcgacccacgcgtccgaggatatctttgttaaattgacaacaatggccatgtatccccatgcccggttacgctgtatgtgcacctgcaacaggtgtacattttgcatctgtcagaacttcctcaactcagacttgctgcaatctgtaaagaacaaaatcttcactgcagttcttaacaggcacgtgacacaagctgacctcaagagctccacgttttggcttcgagcaagttttggtgctactgtttttgcagttttgggctttgctatgtacaaagcattattgaaacagcgatgatataaaaagaaatactgtccctaccaaaaacaaatacttttatgtacattctgaatgctttaagttctgctagaattattgagatatttatacatgcagagttactttattaatatttgtaattcatgcataagagtattttaatgatagttataactgcagtattggctagcatatggaaagaaaacagctaacagccaaactaaaatggctaaattccagaggccaaaagggaatattttgtaaatatatgtacatattcaggcaagatatggtctcccaagctgagttctagaaatgatgtttctagacatttctaagtggtattgttagtgctcacttggctcactcttctaggtttaagttagcccagagattgtatttactcatggatcactttatttatttcacatttactcagaatgatcctttgggttctataaggacataaggtacaatttgccattgtctctccattttttaaaaaacatacaagtcagtgtcagcttaccaacatgacattttttcagtcagttgggggtaggccagccttgaagccatcgcacagtcnaaaaaacttgtggtagctgaagtggngcanctcaccntttaaggggngaagttaggtaaaagcaattanccaaaggngntaaccaaggggaattaaggtggcctnccttggcnanaangttgaatttttananncccntttcnaaggaaaanaaaaaaaaaaattngnnaatttaccnanggtttttantttaaaaaaaaaaagnccccccttaccacggggtgnaatttcncc

SEQ ID NO: 33 - DNA, 702 bp, Homo Sapiens
  misc_feature (3)..(3): n is a, c, g, or t
  misc_feature (425)..(425): n is a, c, g, or t
  misc_feature (550)..(550): n is a, c, g, or t
  misc_feature (592)..(592): n is a, c, g, or t
  misc_feature (602)..(602): n is a, c, g, or t
  misc_feature (610)..(610): n is a, c, g, or t
  misc_feature (616)..(616): n is a, c, g, or t
  misc_feature (643)..(643): n is a, c, g, or t
  misc_feature (646)..(646): n is a, c, g, or t
  misc_feature (652)..(653): n is a, c, g, or t
  misc_feature (655)..(655): n is a, c, g, or t
  misc_feature (663)..(663): n is a, c, g, or t
  misc_feature (667)..(667): n is a, c, g, or t
  misc_feature (674)..(674): n is a, c, g, or t
  misc_feature (688)..(688): n is a, c, g, or t
  misc_feature (692)..(692): n is a, c, g, or t
  misc_feature (694)..(695): n is a, c, g, or t
  misc_feature (697)..(697): n is a, c, g, or t
  misc_feature (701)..(701): n is a, c, g, or t
aanatagagaaattactatgagaggatcgcatcaccatcaccatcacggatcctatttaggtgacactatagaatcgtcgacccacgcgtccgccgcccgtggtccgtggcggcgcgctccacccggcacggggaggcgcggggcgcaccatggccgcagacacgccggggaaaccgagcgcctcgccgatggcaggagcgccggccagcgccagccggaccccagacaagccccggagcgcggccgagcaccgcaaggtggggtcccggccgggcgtgagtggggcgaccggggggcgggagggacgcgggactcagccggtgcccgacccgcagtcctccaagccggtcatggagaagcggcgccgagcgcgtattaacgagagcctcgctcagctcaaaaccctcatcctggacgccctcanaaaagaggtaagtcgggggcgaaggcccgagacccggagtctgggtcgcagctgacctggacctcccgcctatccccgcccccagagctcccgccactcgaagctggagaaggcggacatcctgnagatgaccgtgagacacctgcggagcctgcgtcgcgtgcagntgacggccgngctcaacnccgacnccgccgttctgggcaagtaccgcgccngtnttccannantgtctggnggangtgaacngcttcctggtcggntgcnanntngtcnc

SEQ ID NO: 34 - DNA, 876 bp, Homo Sapiens
tgagaggatcgcatcaccatcaccatcacggatcctatttaggtgacactatagaatcgtcgacccacgcgtccggccccgcccgctccgccgcccgccccgccctccctgccgcccgcgctgccgccgccgccgccgccgccgctactgctgcgggggccgcggggggcgcagctggggcgcggctcggaggggaggctagggggccgtgccaggcccgaagccgaggcggggccgggatgcggcgctgaggcccagcatggccggcccgggccccaccttcccgctgcaccggctcgtctgggcgaaccggcatcgcgaactggaggccgcactgcacagccaccagcacgacattgaacaggaggacccccgcgggcggaccccactggagctggccgtgtctctgggaaacctggagtctgtgagagtgctccttcgacacaatgccaacgtgggcaaagagaaccgccagggctgggcagtcctgcaggaggcagtcagcactggagaccccgagatggtgcagctggtgctccagtatcgggactaccagagggccacgcagaggctggcgggcattccggaactgctcaacaaacttcgccaggcccccgatttctacgttgagatgaagtgggagttcaccagctgggtgccccttgtgtctaagatgtgcccaagcgatgtgtaccgcgtgtggaagcggggtgagagcctgcgagtagacaccagtctcctgggcttcgagcacatgacctgcagcggggccggaggagcttcatcttcaagggccaggaggcaggagccctgtgatggaagtggaccatgaccggcagtggtgcatgtggagacactggggctcactctgcaaga

SEQ ID NO: 35 - DNA, 1179 bp, Homo Sapiens
  misc_feature (1)..(1): n is a, c, g, or t
  misc_feature (900)..(900): n is a, c, g, or t
  misc_feature (926)..(926): n is a, c, g, or t
  misc_feature (929)..(929): n is a, c, g, or t
  misc_feature (950)..(950): n is a, c, g, or t
  misc_feature (981)..(981): n is a, c, g, or t
  misc_feature (989)..(989): n is a, c, g, or t
  misc_feature (1001)..(1001): n is a, c, g, or t
  misc_feature (1004)..(1004): n is a, c, g, or t
  misc_feature (1014)..(1014): n is a, c, g, or t
  misc_feature (1021)..(1021): n is a, c, g, or t
  misc_feature (1027)..(1027): n is a, c, g, or t
  misc_feature (1033)..(1034): n is a, c, g, or t
  misc_feature (1036)..(1036): n is a, c, g, or t
  misc_feature (1047)..(1047): n is a, c, g, or t
  misc_feature (1064)..(1064): n is a, c, g, or t
  misc_feature (1070)..(1070): n is a, c, g, or t
  misc_feature (1074)..(1074): n is a, c, g, or t
  misc_feature (1077)..(1077): n is a, c, g, or t
  misc_feature (1093)..(1093): n is a, c, g, or t
  misc_feature (1097)..(1097): n is a, c, g, or t
  misc_feature (1122)..(1122): n is a, c, g, or t
  misc_feature (1143)..(1143): n is a, c, g, or t
  misc_feature (1149)..(1149): n is a, c, g, or t
  misc_feature (1160)..(1160): n is a, c, g, or t
  misc_feature (1164)..(1164): n is a, c, g, or t
  misc_feature (1167)..(1167): n is a, c, g, or t
  misc_feature (1170)..(1170): n is a, c, g, or t
  misc_feature (1175)..(1176): n is a, c, g, or t
naatagagaaattactatgaagaggatcgcatcaccatcaccatcacggatcctatttaggtgacactatagaatcgtcgacccacgcgtccgggcagttaccttactactgggtaggaatcaagctgtatgatttggttgcaggaagcaattgcctaaaaagcagttatgtcctcagcaaatcaagagcccttgaacatttcccaatgctccagaaggacaaactggtaggagcaattgtctactatgacggacaacataacgatgcacggatgaaccttgccattgctctgactgctgccaggtatggggctgccacagccaattacatggaggtagtgagcttgctcaagaagacagacccccagacagggaaagtgcgtgtgagcggcgcacggtgcaaggatgtcctcacagggcaggaatttgacgtgagagccaaatgtgttatcaatgccacgggacctttcacggactctgtgcgcaaaatggatgataaagacgcagcagctatctgccagccaagtgctggtgtccatattgtgatgcctggttattacagcccagagagcatgggacttcttgacccagcgaccagtgatgggcgagttattttcttcttaccctggcaaaagatgacgatcgctggcactactgatactccaactgatgttacacaccatccaattccttcagaagaagatatcaacttcattttgaatgaagtgcgtaattacctgagttgtgatgttgaagtgagaagaggggatgtcctggcagcatggagtggaatccgtcctcttgttacagaccccaaatctgcagatactcagtctatctccccgaaatcatgttgttgatatcagtgagagtggccttattactatagcaggtggaaangtggacaacttatcggtctatggcanaanataccataaatgctgctgtcnaaactcataatttaaaagcaggaccaagtanaacagttngggcttttcctncangggggtaaanattggancccccnctctanntnaggctttgcangaattatggacttgaancgaggnggcncancctcttgccccccctntggngaaaggcctttgaggggccaaatgncaaggtgatgggcaaaggggncctatngtggaaacccnttgntcnaanttccnnttt

SEQ ID NO: 36 - DNA, 734 bp, Homo Sapiens
  misc_feature (2)..(10): n is a, c, g, or t
  misc_feature (15)..(15): n is a, c, g, or t
  misc_feature (17)..(17): n is a, c, g, or t
  misc_feature (19)..(26): n is a, c, g, or t
  misc_feature (29)..(30): n is a, c, g, or t
  misc_feature (36)..(36): n is a, c, g, or t
  misc_feature (41)..(41): n is a, c, g, or t
  misc_feature (117)..(117): n is a, c, g, or t
  misc_feature (519)..(519): n is a, c, g, or t
  misc_feature (584)..(584): n is a, c, g, or t
  misc_feature (604)..(604): n is a, c, g, or t
  misc_feature (617)..(617): n is a, c, g, or t
  misc_feature (631)..(631): n is a, c, g, or t
  misc_feature (644)..(644): n is a, c, g, or t
  misc_feature (660)..(660): n is a, c, g, or t
  misc_feature (670)..(670): n is a, c, g, or t
  misc_feature (684)..(684): n is a, c, g, or t
  misc_feature (699)..(699): n is a, c, g, or t
  misc_feature (711)..(711): n is a, c, g, or t
  misc_feature (729)..(729): n is a, c, g, or t
  misc_feature (732)..(733): n is a, c, g, or t
annnnnnnnnggggngngnnnnnnnnaanngagganaattnctatgagagggatcgcatcaccatcaccatcacggatcctatttaggtgacactatagaatcgtcgacccacgcgntccgcggacgcgtgggagacgccatctgcttacgagctgccctatgggaccaaggggagtgaggatctgctcctccgggtgctagccatcaccagctcctccatccccaagaacatccagagcctcaggtgccgccgctgtgtggtcgtggggaacgggcaccggctgcggaacagctcactgggagatgccatcaacaagtacgatgtggtcatcagattgaacaatgccccagtggctggctatgagggtgacgtgggctccaagaccaccatgcgtctcttctaccctgaatctgcccacttcgaccccaaagtagaaaacaacccagacacactcctcgtcctggtagctttcaaggcaatggacttccactggattgagaccatcctgagtgataanaagcgggtgcgaaagggtttctggaaacagcctcccctcatctgggatgtcaatcctaaaacagnattcggattctcaacccccnttcttcatggganattggcagcttganaaaactgctgaancctgccaatgcaacangccacggaanaattaaacaaaaancccaccacgggcctntttggccatcangctgggccctcccccctntgnna

SEQ ID NO: 37 - DNA, 1179 bp, Homo Sapiens
  misc_feature (968)..(968): n is a, c, g, or t
  misc_feature (974)..(974): n is a, c, g, or t
  misc_feature (997)..(997): n is a, c, g, or t
  misc_feature (1021)..(1021): n is a, c, g, or t
  misc_feature (1034)..(1034): n is a, c, g, or t
  misc_feature (1039)..(1039): n is a, c, g, or t
  misc_feature (1049)..(1050): n is a, c, g, or t
  misc_feature (1053)..(1054): n is a, c, g, or t
  misc_feature (1056)..(1056): n is a, c, g, or t
  misc_feature (1069)..(1069): n is a, c, g, or t
  misc_feature (1071)..(1071): n is a, c, g, or t
  misc_feature (1090)..(1090): n is a, c, g, or t
  misc_feature (1094)..(1094): n is a, c, g, or t
  misc_feature (1096)..(1096): n is a, c, g, or t
  misc_feature (1115)..(1116): n is a, c, g, or t
  misc_feature (1127)..(1127): n is a, c, g, or t
  misc_feature (1139)..(1141): n is a, c, g, or t
  misc_feature (1146)..(1147): n is a, c, g, or t
  misc_feature (1166)..(1167): n is a, c, g, or t
attagagagattactatgagaggatcgcatcaccatcaccatcacggatcctatttaggtgacactatagaatcgtcgacccacgcgtccgcccacgcgtccgccaaagttcagatctcagaggtggatgccccgccggagggtgaccagatgccaagctccacagactccaggggcctgaagcccctgcaggaggacaccccacagctgatgcgcacacgcagtgatgttggggtgcgtcgccgtggcaatgtgaggacgcctagtgaccagcggcgaatcagacgccaccgcttctccatcaacggccatttctacaaccataagacatccgtgttcacaccagcctatggctctgtcaccaacgtccgcatcaacagcaccatgaccaccccacaggtcctgaagctgctgctcaacaaatttaagattgagaattcagcagaggagtttgccttgtacgtggtccatacgagtggtgagaaacagaagctgaaggccaccgattacccgctgattgcccgaatcctccagggcccatgtgagcagatctccaaagtgttcctaatggagaaggaccaggtggaggaagtcacctacgacgtggcccagtatataaagttcgagatgccggtacttaaaagcttcattcagaagctccaggaggaagaagatcgggaagtaaagaagctgatgcgcaagtaagtgtggcttctggggcactgggtgcacttctcctggggcctcaacagaggggcctctgctgggtcctcgcagggactgtgctgagctgctgcatgggcctgagtctcggctttctttggagggctgcccattgacaaacctggatttcaagtgaggacgtgacagttaagtgtgttcatctacttcttgtgtcagcttctcgtttttgatgtgggacatcaaagtgtctcttgtcctccctcttatggaaagactctgaaaanaaggtnttggtttaaaatttctttggggntctaaaatgcaaaaaatagggaanggggactgttacnctggntttttttaanntanncnattagggctcccnancaggaaaaaaatgctcccntccnangaagggttttttaacgggnnttttaaaaaangggaattttttnnnaaaannttgggccaaaatttggggnnaacctcaaggga

SEQ ID NO: 38 - DNA, 1179 bp, Homo Sapiens
  misc_feature (866)..(866): n is a, c, g, or t
  misc_feature (895)..(895): n is a, c, g, or t
  misc_feature (900)..(900): n is a, c, g, or t
  misc_feature (920)..(920): n is a, c, g, or t
  misc_feature (942)..(942): n is a, c, g, or t
  misc_feature (947)..(947): n is a, c, g, or t
  misc_feature (949)..(950): n is a, c, g, or t
  misc_feature (960)..(960): n is a, c, g, or t
  misc_feature (985)..(985): n is a, c, g, or t
  misc_feature (991)..(991): n is a, c, g, or t
  misc_feature (1005)..(1005): n is a, c, g, or t
  misc_feature (1007)..(1007): n is a, c, g, or t
  misc_feature (1020)..(1020): n is a, c, g, or t
  misc_feature (1025)..(1025): n is a, c, g, or t
  misc_feature (1029)..(1029): n is a, c, g, or t
  misc_feature (1032)..(1032): n is a, c, g, or t
  misc_feature (1058)..(1058): n is a, c, g, or t
  misc_feature (1067)..(1067): n is a, c, g, or t
  misc_feature (1074)..(1074): n is a, c, g, or t
  misc_feature (1077)..(1077): n is a, c, g, or t
  misc_feature (1081)..(1081): n is a, c, g, or t
  misc_feature (1091)..(1092): n is a, c, g, or t
  misc_feature (1094)..(1094): n is a, c, g, or t
  misc_feature (1115)..(1115): n is a, c, g, or t
  misc_feature (1125)..(1125): n is a, c, g, or t
  misc_feature (1131)..(1131): n is a, c, g, or t
  misc_feature (1140)..(1140): n is a, c, g, or t
  misc_feature (1144)..(1144): n is a, c, g, or t
  misc_feature (1147)..(1147): n is a, c, g, or t
  misc_feature (1156)..(1156): n is a, c, g, or t
  misc_feature (1175)..(1175): n is a, c, g, or t
  misc_feature (1178)..(1178): n is a, c, g, or t
tagagaaattactatgagaggatcgcatcaccatcaccatcacggatcctatttaggtgacactatagaatcgtcgacccacgcgtccgggttcttttcccccaccacccccccagcggagcccatcgtggtgaggcttaaggaggtccgactgcagagggacgacttcgagattctgaaggtgatcggacgcggggcgttcagcgaggtagcggtagtgaagatgaagcagacgggccaggtgtatgccatgaagatcatgaacaagtgggacatgctgaagaggggcgaggtgtcgtgcttccgtgaggagagggacgtgttggtgaatggggaccggcggtggatcacgcagctgcacttcgccttccaggatgagaactacctgtacctggtcatggagtattacgtgggcggggacctgctgacactgctgagcaagtttggggagcggattccggccgagatggcgcgcttctacctggcggagattgtcatggccatagactcggtgcaccggcttggctacgtgcacagggacatcaaacccgacaacatcctgctggaccgctgtggccacatccgcctggccgacttcggctcttgcctcaagctgcgggcagatggaacggtgcggtcgctggtggctgtgggcaccccagactacctgtcccccgagatcctgcaggctgtgggcggtgggcctgggacaggcagctacgggcccgagtgtgactggtgggcgctgggtgtattcgcctatgaaatgttctatgggcagacgcccttctacgcggattccacggcggagacctatggcaagatcgtccactacaaggagcacctctctctgccgctggtggacnaagggtccctgaggaggctcgagacttcnttcancggttgctgtgtccccccgnaaacacggctgggccggggtgnaacangnnacttccgganacatccccttcttctttggcctccnactggnatggtctccggganancgtgccccccttnacccngganttncaaagggcccccgaaacatgcaattncaattggtngaagaanggnctcnctgccatggnnancggggcggggaaaaactttcngaaattcggnaaaggncccccctangggnccnccgcctttnggggctcccctaccctgcnggnc

SEQ ID NO: 39 - DNA, 1171 bp, Homo Sapiens
  misc_feature (1)..(1): n is a, c, g, or t
  misc_feature (13)..(13): n is a, c, g, or t
  misc_feature (917)..(917): n is a, c, g, or t
  misc_feature (997)..(997): n is a, c, g, or t
  misc_feature (1008)..(1008): n is a, c, g, or t
  misc_feature (1012)..(1012): n is a, c, g, or t
  misc_feature (1043)..(1043): n is a, c, g, or t
  misc_feature (1054)..(1054): n is a, c, g, or t
  misc_feature (1059)..(1059): n is a, c, g, or t
  misc_feature (1063)..(1063): n is a, c, g, or t
  misc_feature (1073)..(1073): n is a, c, g, or t
  misc_feature (1075)..(1075): n is a, c, g, or t
  misc_feature (1077)..(1077): n is a, c, g, or t
  misc_feature (1086)..(1086): n is a, c, g, or t
  misc_feature (1093)..(1093): n is a, c, g, or t
  misc_feature (1096)..(1096): n is a, c, g, or t
  misc_feature (1115)..(1115): n is a, c, g, or t
  misc_feature (1118)..(1118): n is a, c, g, or t
  misc_feature (1122)..(1122): n is a, c, g, or t
  misc_feature (1129)..(1129): n is a, c, g, or t
  misc_feature (1132)..(1133): n is a, c, g, or t
  misc_feature (1155)..(1155): n is a, c, g, or t
  misc_feature (1159)..(1160): n is a, c, g, or t
  misc_feature (1165)..(1165): n is a, c, g, or t
ntagagaaattanctatgagaggatcgcatcaccatcaccatcacggatcctatttaggtgacactatagaatcgtcgacccacgcgtccgctggaccagcaggcaaaacaaagctagagaaacaattccagggtctcactctgtcacccaggctggagtgcagaggcacaatctcggctcactgcaaccttcctctccctggcttaactgatcctcctacctcagcctcccgagtggctaggactatactcctgagccagtcaaatatacagcagagtgactattctgcagccctaaagcaatgcaacagggaaaagaatcgaacttcttctatcatccctgtggaaagatcaagggttggcatttcatccctgagtggagaaggcacagactacatcaatgcctcctatatcatgggctattaccagagcaatgaattcatcattacccagcaccctctccttcataccatcaaggatttctggaggatgatatgggaccataatgcccaactggtggttatgattcctgatggccaaaacatggcagaagatgaatttgtttactggccaaataaagatgagcctataaattgtgagagctttaaggtcactcttatggctgaagaacacaaatgtctatctaatgaggaaaaacttataattcaggactttatcttagaagctacacaggatgattatgtacttgaagtgaggcactttcagtgtcctaaatggccaaatccagatagccccattagtaaaacttttgaacttataagtgttataaaagaagaagctgccaatagggatgggcctatgattgttcatgatgagcatggaggagtgacggcaggaaactttctgtgctctgacaacccttatgcaccaactagaaaaagaaattccgtggatgntttaccaggtagccaagatgatcaatctgatgaggccaggagtctttgctgacattgagcagtatcagtttctctacaangtgatcctcancctngtgagcccaaggcaggaaaaaaatccatccncctctctgganagtantggngcacattgcngnanggaaaatanctgaaanctnaaatctttatttaaacaanaangggnggggganccnnatttgaaattgtttccctttcnaaannaggcngaaaac

SEQ ID NO: 40 - DNA, 1179 bp, Homo Sapiens
  misc_feature (28)..(28): n is a, c, g, or t
  misc_feature (847)..(847): n is a, c, g, or t
  misc_feature (893)..(893): n is a, c, g, or t
  misc_feature (903)..(903): n is a, c, g, or t
  misc_feature (914)..(914): n is a, c, g, or t
  misc_feature (933)..(933): n is a, c, g, or t
  misc_feature (942)..(942): n is a, c, g, or t
  misc_feature (947)..(947): n is a, c, g, or t
  misc_feature (987)..(987): n is a, c, g, or t
  misc_feature (1000)..(1001): n is a, c, g, or t
  misc_feature (1007)..(1007): n is a, c, g, or t
  misc_feature (1023)..(1023): n is a, c, g, or t
  misc_feature (1027)..(1027): n is a, c, g, or t
  misc_feature (1033)..(1034): n is a, c, g, or t
  misc_feature (1055)..(1055): n is a, c, g, or t
  misc_feature (1071)..(1071): n is a, c, g, or t
  misc_feature (1088)..(1088): n is a, c, g, or t
  misc_feature (1090)..(1090): n is a, c, g, or t
  misc_feature (1109)..(1110): n is a, c, g, or t
  misc_feature (1128)..(1128): n is a, c, g, or t
  misc_feature (1134)..(1134): n is a, c, g, or t
  misc_feature (1136)..(1136): n is a, c, g, or t
  misc_feature (1140)..(1140): n is a, c, g, or t
  misc_feature (1143)..(1144): n is a, c, g, or t
  misc_feature (1146)..(1146): n is a, c, g, or t
  misc_feature (1148)..(1151): n is a, c, g, or t
  misc_feature (1167)..(1167): n is a, c, g, or t
  misc_feature (1175)..(1175): n is a, c, g, or t
  misc_feature (1179)..(1179): n is a, c, g, or t
attagagaaattactatgagaggatcgnatcaccagtcaccatcacgggatcctatttaggtgacactatagaatcgtcgacccacgcgtccggaagaattgtagataagcctgactggcagccctatttgccacagaacggagacaacattgaagttgccttctcctactcctcggtcttatggccttggtcgggctacctggccatctccatttctgtgaccaagaaagcggcttcctgggaaggcattgctcagggccatgtcatgatcactgtggcttccccagcagagacagagtcaaaaaatggtgcagaacagacttcaacagtaaagctccccattaaggtgaagataattcctactcccccgcgaagcaagagagttctctgggatcagtaccacaacctccgctatccacctggctatttccccagggataatttaaggatgaagaatgaccctttagactggaatggtgatcacatccacaccaatttcagggatatgtaccagcatctgagaagcatgggctactttgtagaggtcctcggggcccccttcacgtgttttgatgccagtcagtatggcactttgctgatggtggacagtgaggaggagtacttccctgaagagatcgccaagctccggagggacgtggacaacggcctctcgctcgtcatcttcagtgactggtacaacacttctgttatgagaaaagtgaagttttatgatgaaaacacaaggcagtggtggatgccggataccggaggagctaacatcccagctctgaatgagctgctgtctgtgtggaacatggggttcagcgatggcctgtatgaaggggnagttcaccctggccaaccatgacatgtattatgcgtcagggtgcancatcccgaanttttccaaaanatggcgtcgtgataacacnagactttcnaaggnaccaaaggaatgggaggttttaaagccagggaaacagcanttgttggaaaacnntccccntttttgggaactttanccanattccnncttgagggggggaagccggantgtaactgtatggggnactcccaattgctggangnaaatcccccaacaaaaggnngcttttgggcttctggangccccncncccnaannantnnnnaggggggaaccccccnaaccccantccn

SEQ ID NO: 41 - DNA, 1151 bp, Homo Sapiens
  misc_feature (122)..(122): n is a, c, g, or t
  misc_feature (829)..(829): n is a, c, g, or t
  misc_feature (868)..(868): n is a, c, g, or t
  misc_feature (902)..(902): n is a, c, g, or t
  misc_feature (906)..(906): n is a, c, g, or t
  misc_feature (910)..(910): n is a, c, g, or t
  misc_feature (914)..(914): n is a, c, g, or t
  misc_feature (925)..(925): n is a, c, g, or t
  misc_feature (928)..(928): n is a, c, g, or t
  misc_feature (954)..(954): n is a, c, g, or t
  misc_feature (963)..(963): n is a, c, g, or t
  misc_feature (985)..(985): n is a, c, g, or t
  misc_feature (1004)..(1004): n is a, c, g, or t
  misc_feature (1018)..(1018): n is a, c, g, or t
  misc_feature (1020)..(1020): n is a, c, g, or t
  misc_feature (1022)..(1022): n is a, c, g, or t
  misc_feature (1025)..(1025): n is a, c, g, or t
  misc_feature (1027)..(1027): n is a, c, g, or t
  misc_feature (1032)..(1032): n is a, c, g, or t
  misc_feature (1035)..(1035): n is a, c, g, or t
  misc_feature (1047)..(1047): n is a, c, g, or t
  misc_feature (1058)..(1058): n is a, c, g, or t
  misc_feature (1065)..(1065): n is a, c, g, or t
  misc_feature (1076)..(1076): n is a, c, g, or t
  misc_feature (1081)..(1081): n is a, c, g, or t
  misc_feature (1086)..(1086): n is a, c, g, or t
  misc_feature (1092)..(1092): n is a, c, g, or t
  misc_feature (1105)..(1105): n is a, c, g, or t
  misc_feature (1107)..(1107): n is a, c, g, or t
  misc_feature (1110)..(1110): n is a, c, g, or t
  misc_feature (1124)..(1124): n is a, c, g, or t
  misc_feature (1131)..(1131): n is a, c, g, or t
  misc_feature (1139)..(1140): n is a, c, g, or t
  misc_feature (1146)..(1148): n is a, c, g, or t
  misc_feature (1151)..(1151): n is a, c, g, or t
agaaattactatgagaggatcgcatcaccatcaccatcacggatcctatttaggtgacactatagaatcgtcgacccacgcgtccgcccacgcgttccggcagcagctgctggggatcgcanaccagcccctgacacctggatttatccgctgattcagatgaagcccttcgagattcaaatcgatgagattgtcactgagaccctgttgactgaggcggagcgcggggcaaaggtctacctcaccactggctatttcaacctgacccaggcctacatggacctggtcttgggcactcgggctgagtaccagatcctgctggcctcaccagaggtgaatggcttctttggggccaagggggtggccggcgccatcccagcggcctatgtgcacatcgagcgacagttcttcagtgaggtgtgcagcctgggacagcaggagcgggtccagcttcaggagtactggcggaggggctggacgttccacgccaaaggcctctggctgtacctggcagggagcagcctgccctgtctcacgctgattggctctcctaattttgggtacaggtcagttcaccgggacctggaggcccagattgcgatcgtgacggagaaccaggccctgcagcagcagcttcaccagcaagagcagctctacctgaggtcaggtgtggtgtcctctgccaccttcgagcagccgagtcgccaggtgaagctgtgggtgaagatggtgactccactgatcaagaacttcttctgaggacagacaggaatggccttgatgaaaatgacaggcatggccggggtcagctctttcagccgcgcttcancgatgactccagtctgggtgtcccagcgagcccctgcanggacagtatggctgaaggtcaggtgtgctgccantaantganggangggctggcagnaangggtggggtcctcaaactccccgccntctgaaaanctgggctctaccccaaaaaggnttcaggccaactgccacanctggaaacaaaagncntnccnangtganggncctgcatgtttnaaactaccccntcccccntgggctcaagnaaaanctcanctaaancccctcgggttcnanccntttaaatctggggnatttttnaaaacccnntttgtnnnccn

SEQ ID NO: 42 - DNA, 1132 bp, Homo Sapiens
  misc_feature (1)..(2): n is a, c, g, or t
  misc_feature (844)..(844): n is a, c, g, or t
  misc_feature (865)..(865): n is a, c, g, or t
  misc_feature (933)..(934): n is a, c, g, or t
  misc_feature (938)..(938): n is a, c, g, or t
  misc_feature (950)..(950): n is a, c, g, or t
  misc_feature (978)..(978): n is a, c, g, or t
  misc_feature (980)..(980): n is a, c, g, or t
  misc_feature (985)..(985): n is a, c, g, or t
  misc_feature (997)..(997): n is a, c, g, or t
  misc_feature (1005)..(1005): n is a, c, g, or t
  misc_feature (1010)..(1010): n is a, c, g, or t
  misc_feature (1014)..(1014): n is a, c, g, or t
  misc_feature (1031)..(1031): n is a, c, g, or t
  misc_feature (1068)..(1068): n is a, c, g, or t
  misc_feature (1079)..(1079): n is a, c, g, or t
  misc_feature (1100)..(1100): n is a, c, g, or t
  misc_feature (1110)..(1132): n is a, c, g, or t
nnattagagaaattactatgagaggatcgcatcaccatcaccatcacggatcctatttaggtgacactatagaatcgtcgacccacgcgtccggccgagcgcccgcgggagccgagcgcagccgagggcgagccgcggaacggggccggcgtggagaggtagcgggaaggatgaccacgctcacacgacaagacctcaactttggccaagtggtggccgatgtgctctgcgagttcctggaggtggctgtgcatctcatcctctacgtgcgcgaggtctaccccgtgggcatcttccagaaacgcaagaagtacaacgtgccggtccagatgtcctgccacccggagctgaatcagtatatccaggacacgctgcactgcgtcaagccactcctggagaagaatgatgtggagaaagtggtggtggtgattttggataaagagcaccgcccagtggagaaattcgtctttgagatcacccagcctccactgctgtccatcagctcagactcgctgttgtctcatgtggagcagctgctccgggccttcatcctgaagatcagcgtgtgcgatgccgtcctggaccacaaccccccaggctgtaccttcacagtcctggtgcacacgagagaagccgccactcgcaacatggagaagatccaggtcatcaaggatttcccctggatcctggcggatgagcaggatgtccacatgcatgacccccggctgataccactaaaaaccatgacgtcggacattttaaagatgcagctttacgtggaagagcgcgctcataaaggcagctgagggggcacctgccaccccactgatgcccaaactgtcanactttgggggatcccgcctanggcagtgctgcatggctgccctgattccaagtgctcttatcccctctgtgtgtggatcgcccgccccnncccnggggccgctcangtctgcttggaaggatgcctcccccagnanggcantgagggatgccncaacctcnacttntcancctcctggggttccccngccaaaactgtctgtcccaaatactgggctgggagtnttttcaaaaangggccccaagggctgggcttnaaaaaaaaannnnnnnnnnnnnnnnnnnnnnn

SEQ ID NO: 43 - DNA, 593 bp, Homo Sapiens
  misc_feature (15)..(15): n is a, c, g, or t
  misc_feature (587)..(587): n is a, c, g, or t
  misc_feature (589)..(589): n is a, c, g, or t
  misc_feature (593)..(593): n is a, c, g, or t
aatagagaaattacnatgagaggatcgcatcaccatcaccatcacggatcctatttaggtgacactatagaatcgtcgacccacgcgtccggcttgctagctgtgtgggctgggaggtctggtagggctgagcttgcaagaggatcaacatgcctttggctagagatttactacatccgtccttggaagaggaaaagaaaaaacataaaaagaaacgcctagtacaaagtccaaattcttactttatggatgtaaaatgtccaggttgctacaagatcaccacggttttcagccatgctcagacagtggttctttgtgtaggttgttcaacagtgttgtgccagcctacaggaggaaaggccagactcacagaagggtgttcatttagaagaaagcaacactaatgattcaaacagcttcctgaattttaattttgtgttgtctcacagaaagccttatcataaattccataattctaattaatttaccaagataatgtaattacatttggttttgtaaggtatacagcagtaatctcctattttggtgtcagtttttcaataaagttttgattatgggcaaaaaananaaan

SEQ ID NO: 44 - DNA, 915 bp, Homo Sapiens
ctatgagaggatcgcatcaccatcaccatcacggatcctatttaggtgacactatagaatcgtcgacccacgcgtccgctccactggccactgagccggactcgctcagagcccctgccccccagtgccaccgctcccccaccgccgggccccatgcagccccgcctggagcagctcaaaactcacgtccaggtgatcaagaggtcagccaagccgagtgagaagccccggctgcggcagataccctcggctgaagacctggagacagatggcgggggaccgggccaggtggtggacgatggcctggagcacagggagctgggccatgggcagcctgaggccagaggccccgctcctctccagcagcaccctcaggtgttgctctgggaacagcagcgactggctgggcggctcccctggggcagcaccggggacactgtgctgcttcctctggcccagggtgggcaccggcctctgtcccgggctcagtcttccccagccgcacctgcctcactgtcagccccagagcctgccagccaggcccgagtcctctccagctcagagacccctgccaggaccctgcccttcaccacagggctgatctatgactcggtcatgctgaagcaccagtgctcctgcggtgacaacagcaggcacccggagcacgccggccgcatccagagcatctggtcccggctgcaggagcgggggctccggagccagtgtgagtgtctccgaggccggaaggcctccctggaagagctgcagtcggtccactctgagcggcacgtgctcctctacggcaccaacccgctcagccgcctcaaactggacaacgggaagctggcagggctcctggcacagcggatgtttgtgatgctgccctgtggtggggttgggggtaagtgtgcccag

SEQ ID NO: 45 - DNA, 1324 bp, Homo Sapiens
  misc_feature (1)..(1): n is a, c, g, or t
  misc_feature (3)..(3): n is a, c, g, or t
  misc_feature (8)..(8): n is a, c, g, or t
  misc_feature (10)..(10): n is a, c, g, or t
  misc_feature (825)..(825): n is a, c, g, or t
  misc_feature (841)..(841): n is a, c, g, or t
  misc_feature (871)..(871): n is a, c, g, or t
  misc_feature (883)..(883): n is a, c, g, or t
  misc_feature (896)..(896): n is a, c, g, or t
  misc_feature (914)..(914): n is a, c, g, or t
  misc_feature (935)..(935): n is a, c, g, or t
  misc_feature (945)..(945): n is a, c, g, or t
  misc_feature (977)..(977): n is a, c, g, or t
  misc_feature (983)..(983): n is a, c, g, or t
  misc_feature (1003)..(1003): n is a, c, g, or t
  misc_feature (1015)..(1015): n is a, c, g, or t
  misc_feature (1017)..(1017): n is a, c, g, or t
  misc_feature (1021)..(1021): n is a, c, g, or t
  misc_feature (1029)..(1029): n is a, c, g, or t
  misc_feature (1031)..(1031): n is a, c, g, or t
  misc_feature (1036)..(1036): n is a, c, g, or t
  misc_feature (1043)..(1043): n is a, c, g, or t
  misc_feature (1045)..(1045): n is a, c, g, or t
  misc_feature (1083)..(1083): n is a, c, g, or t
  misc_feature (1088)..(1089): n is a, c, g, or t
  misc_feature (1093)..(1093): n is a, c, g, or t
  misc_feature (1096)..(1096): n is a, c, g, or t
  misc_feature (1112)..(1112): n is a, c, g, or t
  misc_feature (1129)..(1129): n is a, c, g, or t
  misc_feature (1132)..(1132): n is a, c, g, or t
  misc_feature (1135)..(1135): n is a, c, g, or t
  misc_feature (1144)..(1144): n is a, c, g, or t
  misc_feature (1146)..(1146): n is a, c, g, or t
  misc_feature (1149)..(1149): n is a, c, g, or t
  misc_feature (1156)..(1156): n is a, c, g, or t
  misc_feature (1163)..(1163): n is a, c, g, or t
  misc_feature (1169)..(1169): n is a, c, g, or t
  misc_feature (1174)..(1174): n is a, c, g, or t
  misc_feature (1196)..(1196): n is a, c, g, or t
  misc_feature (1200)..(1200): n is a, c, g, or t
  misc_feature (1209)..(1209): n is a, c, g, or t
  misc_feature (1211)..(1211): n is a, c, g, or t
  misc_feature (1213)..(1213): n is a, c, g, or t
  misc_feature (1230)..(1230): n is a, c, g, or t
  misc_feature (1234)..(1236): n is a, c, g, or t
  misc_feature (1248)..(1248): n is a, c, g, or t
  misc_feature (1263)..(1263): n is a, c, g, or t
  misc_feature (1281)..(1281): n is a, c, g, or t
  misc_feature (1286)..(1286): n is a, c, g, or t
  misc_feature (1295)..(1295): n is a, c, g, or t
  misc_feature (1298)..(1298): n is a, c, g, or t
  misc_feature (1303)..(1304): n is a, c, g, or t
  misc_feature (1313)..(1313): n is a, c, g, or t
  misc_feature (1321)..(1321): n is a, c, g, or t
nantagangnaattactatgagaggatcgcatcaccatcaccatcacggatcctatttaggtgacactatagaatcgtcgacccacgcgtccggtgaaaatgaccaagaagaaggcttcacaagtcacgagatggcagttttggagccagaagtgctctccgtgcacactacctggaggacaagaggaagtaacctcaagaatagaattccttttggggaagaaagagctggccttcaggaaaagcatcccggaggaggaagaagaagtgttatacgtcctaaagtaaggtttcaggccagcatccttcagaaaaagcatccccgaggaggaagacgaatcgttaaacatctgaaagggtcaggccagcatccttcagaaaaagcatccccgaggaggaagacgaatcgttaaacatcttaggtcagctctagcctctcggaatttgtcttcttcagtggaaaccccgagaagactgatcagttcttcagttctaaaacaatggcccagggtttggtgacgttcgccgacgtagccatagacttttctcaggaggagtgggcctgtctgaactctgctcagagggacctgtactgggacgtgatgctggagaactacagtaacttggtctcactggatttggagtcagcatatgaaaataagagtttacctacagaaaaaaacattcatgaaataagggcttccaaaaggaattcagatagaagaagtaaatcccttggccgtaactggatatgtgaaggtacgcttgaaagaccacagcgctccagagggaggtatgtcaatcagatgatcatcaattatgtcnaaaggcctgctactanagaaggcacccctcctagaacacatcaganacatcataaggnagaattcctttgnaatgtaaggactgggggnaaggccttttagtcgtggctntcaactttanttcaacatccaaaaaatcccatactgggtganaaaccnttatgaattgtaaaaaatgntaaaaagggccntnccgnttggggcnantccancttactncnaaattccaaaaatttctactgggggaaaaacccctccnaattnnaaanacngggggaaaggcttttncaagggggcccaagccnccnttnttctaaaangnttnttctggngaaaaancctttnaatgnaaaaccgggggaaaggcccttnccgnggggggagnancnccccccccccaaaattncccnnngggaaaaaaccnaaaggcaaactgggnaaaacctttcccgggggnaaatnttttccccnaanaattnntgggggganaacccttnaag

SEQ ID NO: 46 - DNA, 1180 bp, Homo Sapiens
  misc_feature (125)..(125): n is a, c, g, or t
  misc_feature (760)..(760): n is a, c, g, or t
  misc_feature (767)..(767): n is a, c, g, or t
  misc_feature (848)..(848): n is a, c, g, or t
  misc_feature (864)..(864): n is a, c, g, or t
  misc_feature (869)..(869): n is a, c, g, or t
  misc_feature (882)..(882): n is a, c, g, or t
  misc_feature (912)..(912): n is a, c, g, or t
  misc_feature (915)..(915): n is a, c, g, or t
  misc_feature (980)..(980): n is a, c, g, or t
  misc_feature (996)..(996): n is a, c, g, or t
  misc_feature (998)..(998): n is a, c, g, or t
  misc_feature (1007)..(1007): n is a, c, g, or t
  misc_feature (1009)..(1009): n is a, c, g, or t
  misc_feature (1011)..(1011): n is a, c, g, or t
  misc_feature (1013)..(1013): n is a, c, g, or t
  misc_feature (1030)..(1030): n is a, c, g, or t
  misc_feature (1035)..(1036): n is a, c, g, or t
  misc_feature (1038)..(1038): n is a, c, g, or t
  misc_feature (1045)..(1045): n is a, c, g, or t
  misc_feature (1050)..(1050): n is a, c, g, or t
  misc_feature (1057)..(1057): n is a, c, g, or t
  misc_feature (1059)..(1059): n is a, c, g, or t
  misc_feature (1064)..(1064): n is a, c, g, or t
  misc_feature (1072)..(1072): n is a, c, g, or t
  misc_feature (1078)..(1078): n is a, c, g, or t
  misc_feature (1085)..(1086): n is a, c, g, or t
  misc_feature (1108)..(1108): n is a, c, g, or t
  misc_feature (1110)..(1110): n is a, c, g, or t
  misc_feature (1120)..(1120): n is a, c, g, or t
  misc_feature (1127)..(1127): n is a, c, g, or t
  misc_feature (1140)..(1140): n is a, c, g, or t
  misc_feature (1144)..(1144): n is a, c, g, or t
  misc_feature (1150)..(1150): n is a, c, g, or t
  misc_feature (1153)..(1153): n is a, c, g, or t
  misc_feature (1162)..(1162): n is a, c, g, or t
  misc_feature (1166)..(1166): n is a, c, g, or t
  misc_feature (1171)..(1171): n is a, c, g, or t
  misc_feature (1173)..(1173): n is a, c, g, or t
  misc_feature (1176)..(1176): n is a, c, g, or t
  misc_feature (1180)..(1180): n is a, c, g, or t
tagagaaaattactatgagaggatcgcatcaccatcaccatcacggatcctatttaggtgacactatagaatcgtcgacccacgcgtccgcccacgcgtccgctctccttggccgtggggccacnggaccctgacgagggagtctccccagagcatctggaacagctcctaggccagctgggccagacgctgcggtgccgccagttcctgtgcccacctgctgagcagcatctggcaaagtgctctgtggagttagcttccctcctcgttgcagatcaaattcctatcctagggcccccggcacagtacaggctggagagagggcaggctcgaaggcttctgcacatgctgctttccttgtggaaggaagactttcaggggccggttccgctgcagctgctgctgagcccaagaaatgtggggcttctggcagacacaaggccaagggagtgggacttgctgctattcttgctacgggagctggtggagaagggtctgatgggacggatggagatagaggcctgcctgggcagcctccaccaggcccagtggccaggggactttgctgaagaattagcaacactgtctaatctgtttctagccgagccccacctgccagaaccccagctaagagcctgtgagttggtgcagccaaaccggggcactgtgctggcccagagctagggctgagaagtggccctgccttgggcattgcaccagaaccctggaaccccgcctcacgaggaggcccaagtgcccnaatgcanaccctcactggttgggggtgtagctgggtctacagtcaaacttcctgctctaagggtgtcactgcctggcatcccaccacncgaatcctaaaagaangaaanttggcctgatttnggattatggcaaaaaatccaaaaatgccantcntggaataaaaaagtggtgtttgtttatctcttggaaactaaatgaaatgaggtgtgtggggcttntcaaaaacaaaaattnanccctatttntntntnccaacattttttaaaanttttnnantctttgnaattnttgaaanangcaantgactccntgcttnacttttnnaaaaaagttaaaaaatgaattntngggaatctanatttttnttttaccaggaanctgnacggcnttntctttaaantgcnaaaanangcngggn

SEQ ID NO: 47 - DNA, 1179 bp, Homo Sapiens
  misc_feature (854)..(854): n is a, c, g, or t
  misc_feature (891)..(891): n is a, c, g, or t
  misc_feature (893)..(893): n is a, c, g, or t
  misc_feature (906)..(906): n is a, c, g, or t
  misc_feature (914)..(914): n is a, c, g, or t
  misc_feature (918)..(918): n is a, c, g, or t
  misc_feature (945)..(945): n is a, c, g, or t
  misc_feature (977)..(977): n is a, c, g, or t
  misc_feature (1024)..(1024): n is a, c, g, or t
  misc_feature (1047)..(1047): n is a, c, g, or t
  misc_feature (1049)..(1049): n is a, c, g, or t
  misc_feature (1051)..(1051): n is a, c, g, or t
  misc_feature (1066)..(1066): n is a, c, g, or t
  misc_feature (1073)..(1073): n is a, c, g, or t
  misc_feature (1077)..(1077): n is a, c, g, or t
  misc_feature (1079)..(1079): n is a, c, g, or t
  misc_feature (1086)..(1086): n is a, c, g, or t
  misc_feature (1103)..(1103): n is a, c, g, or t
  misc_feature (1111)..(1111): n is a, c, g, or t
  misc_feature (1127)..(1127): n is a, c, g, or t
  misc_feature (1139)..(1139): n is a, c, g, or t
  misc_feature (1148)..(1148): n is a, c, g, or t
  misc_feature (1150)..(1150): n is a, c, g, or t
  misc_feature (1154)..(1154): n is a, c, g, or t
  misc_feature (1158)..(1160): n is a, c, g, or t
  misc_feature (1174)..(1174): n is a, c, g, or t
tagagaaattactatgagaggatcgcatcaccatcaccatcacggatcctatttaggtgacactatagaatcgtcgacccacgcgtccgcccacgcgtccggctgctggcgcccctgctgccggcgctgctgctggtgcggcccgcgggggccctggtggaggggctctactgcggcacgcgggactgctacgaggtgctgggcgtgagccgctcggcgggcaaggcggagatcgcgcgggcctaccgccagctggcccggcgctaccaccctgaccgctaccggccccagcccggagacgagggccccgggcggacgccgcagagcgccgaggaggctttcctgctggtggcaaccgcctacgagacactcaagtcctcctgcatatgcccaagaggattgggagtggaatggacaccagcagaagcaccacagttattcctgtagagattagaaacaaggagcttattgccctgcttgtcaaggctcaggacagacaggaggaagaaacaagtataaaggttttggttttggaaagaagttggaatctccagaccctgggaccttaagatccacaaaattgctgaaagaaaaagtactaccttattgaaaggatgaagaaacacgaaaagattatgattacatgctggatcatccagaagagtactacagccattactaccactactatagcaggcgcttggcccctaaggtggatgttagagtagtgattttggtcagcgtgtgtgctatttcggtgtttcagtttttcagctggtggaatagctacaataaggcaatcagctacctagccacagtgcccaagtaccgtatccaagctacagaaattgccnaagcagcagggactgctcaaaaaagccaaagaaaaangncaaaaacaaaaantcccaaanaaanaaattcgtgacgaggagaagaacatcntaaagaacattataaaaaagtaaaataatatnaagggggggctatcaaaaaaccccaaatctgggatcttctcctgttncaaattaatcttaactccttttncncntatgctcaaaaaaantttgggnattngncgggggnattttaaaattttaacnttcaaagncaaaaaaatgggaaangaaaaaaaaatnaactttttncntaantctnnnaaaatttcaaattnccatt

SEQ ID NO: 48 - DNA, 1134 bp, Homo Sapiens
  misc_feature (870)..(870): n is a, c, g, or t
  misc_feature (876)..(876): n is a, c, g, or t
  misc_feature (897)..(897): n is a, c, g, or t
  misc_feature (900)..(900): n is a, c, g, or t
  misc_feature (935)..(935): n is a, c, g, or t
  misc_feature (940)..(940): n is a, c, g, or t
  misc_feature (967)..(967): n is a, c, g, or t
  misc_feature (973)..(973): n is a, c, g, or t
  misc_feature (990)..(990): n is a, c, g, or t
  misc_feature (996)..(996): n is a, c, g, or t
  misc_feature (999)..(999): n is a, c, g, or t
  misc_feature (1001)..(1001): n is a, c, g, or t
  misc_feature (1011)..(1012): n is a, c, g, or t
  misc_feature (1020)..(1020): n is a, c, g, or t
  misc_feature (1033)..(1033): n is a, c, g, or t
  misc_feature (1044)..(1044): n is a, c, g, or t
  misc_feature (1071)..(1071): n is a, c, g, or t
  misc_feature (1078)..(1078): n is a, c, g, or t
  misc_feature (1087)..(1087): n is a, c, g, or t
  misc_feature (1090)..(1090): n is a, c, g, or t
  misc_feature (1100)..(1100): n is a, c, g, or t
  misc_feature (1113)..(1113): n is a, c, g, or t
  misc_feature (1122)..(1122): n is a, c, g, or t
  misc_feature (1124)..(1125): n is a, c, g, or t
tagagaaattactatgagaggatcgcatcaccatcaccatcacggatcctatttaggtgacactatagaatcgtcgacccacgcgtccgctctgaccactgtgcctggtgtcatcagatacaaaggtgccaagatccagctcctggatctcccaggtatcattgaaggtgccaaggatgggaaaggtagaggtcgtcaagtcattgcagtggcccgaacctgtaacttgatcttgattgttctggatgtcctgaaacctttgggacataagaagataattgaaaatgagctggaaggctttggcattcgcttgaacagcaaaccccccaacattggctttaagaagaaggacaagggaggcattaatctcacagccacttgcccccagagtgagctggatgctgaaactgtgaagagcattctggctgaatacaagattcataatgccgatgtgactctacgtagtgatgctacagctgatgacctcattgatgtggtggaaggaaacagagtttatatcccctgtatctatgtgttaaataagattgaccaaatctccattgaggaattggatatcatctataaggtgcctcactgtgtacccatctctgcccatcaccgctggaattttgatgacctattggaaaagatctgggactatctgaaactagtgagaatttacaccaaacccaaaggccagttaccagattacacatccccagtggtgcttccttactccaggaccacagtggaggatttctgcatgaagattcacaaaaaatcttatcaaagaatttaaaatatgctctggtctggggtctctctgtgaaacacaatcctcaaaaagtgggtaaagaccatacgttggangatgangatgtcattcaaattgtgaanaantgaaaacctttccctttttcccatctgccggaacnaaccncaaacagcgttcccccatgatcaagcnccctanccccaattctttctggnttttgncantncctgggatcnnggatcccnggggagggaaaanggaggcccccnaactggaaacttccttttgccttaccntgggggnccccttgtntgnccaaactgcnaaaaaaatctggnaaggtgggncnnctccctgcc

SEQ ID NO: 49 - DNA, 1004 bp, Homo Sapiens
  misc_feature (856)..(856): n is a, c, g, or t
  misc_feature (882)..(882): n is a, c, g, or t
  misc_feature (936)..(936): n is a, c, g, or t
  misc_feature (960)..(960): n is a, c, g, or t
  misc_feature (970)..(970): n is a, c, g, or t
  misc_feature (972)..(972): n is a, c, g, or t
  misc_feature (975)..(975): n is a, c, g, or t
  misc_feature (981)..(982): n is a, c, g, or t
  misc_feature (987)..(987): n is a, c, g, or t
  misc_feature (993)..(993): n is a, c, g, or t
  misc_feature (997)..(997): n is a, c, g, or t
  misc_feature (999)..(999): n is a, c, g, or t
  misc_feature (1002)..(1003): n is a, c, g, or t
aattagagagaattactatgagaggatcgcatcaccatcaccatcacggatcctatttaggtgacactatagaatcgtcgacccacgcgtccggcccctagcctgcagagcagtgttcggcagcgcctgacggagccacagcatggcctgggatctcagagggatttgacccattccgattcggagtcctccctccacatgagtgaccgccagcgtgtggcccccaaacctcctcagatgagccgtgctgcagacgaggctctcaatgccatgacttccaatggcagccaccggctgatcgagggggtccacccagggtctctggtggagaaactgcctgacagccctgccctggccaagaaggcattactggcgctgaaccatgggctggacaaggcccacagcctgatggagctgagcccctcagccccacctggtggctctccacatttggattcttcccgttctcacagccccagctccccagacccagacacaccatctccagttggggacagccgagccctgcaagccagccgaaacacacgcattccccacctggctggcaagaaggctgtggctgaggaggataatggctctattggcgaggaaacagactccagcccaggccggaagaagtttcccctcaaaatctttaagaagcctcttaagaagtaggcaggatggggtggcagtaaagggacagcttgtccttccctgggtgttctgtctctccttccctcccttccttcaagataactggccccaagagtggggcatgggaagggctggtccaggggtctgggcactgtacatacctgccccctcatccttggggtccttcattattatttantaactgaccaccatggccctgcctgnccctgcctccgtcccaaccatgggctgctgctgtcactcccctctccacttcantgcatgtcttaattgctgttcccntcaacttccnanctncacctnnggggnttcaancttntnttnnt

SEQ ID NO: 50 - DNA, 1277 bp, Homo Sapiens
  misc_feature (7)..(7): n is a, c, g, or t
  misc_feature (873)..(873): n is a, c, g, or t
  misc_feature (931)..(931): n is a, c, g, or t
  misc_feature (966)..(966): n is a, c, g, or t
  misc_feature (990)..(990): n is a, c, g, or t
  misc_feature (994)..(995): n is a, c, g, or t
  misc_feature (997)..(997): n is a, c, g, or t
  misc_feature (1003)..(1003): n is a, c, g, or t
  misc_feature (1027)..(1027): n is a, c, g, or t
  misc_feature (1031)..(1031): n is a, c, g, or t
  misc_feature (1058)..(1059): n is a, c, g, or t
  misc_feature (1066)..(1066): n is a, c, g, or t
  misc_feature (1068)..(1068): n is a, c, g, or t
  misc_feature (1074)..(1074): n is a, c, g, or t
  misc_feature (1090)..(1090): n is a, c, g, or t
  misc_feature (1101)..(1101): n is a, c, g, or t
  misc_feature (1106)..(1106): n is a, c, g, or t
  misc_feature (1109)..(1109): n is a, c, g, or t
  misc_feature (1115)..(1115): n is a, c, g, or t
  misc_feature (1120)..(1120): n is a, c, g, or t
  misc_feature (1122)..(1122): n is a, c, g, or t
  misc_feature (1140)..(1141): n is a, c, g, or t
  misc_feature (1143)..(1143): n is a, c, g, or t
  misc_feature (1162)..(1163): n is a, c, g, or t
  misc_feature (1172)..(1173): n is a, c, g, or t
  misc_feature (1188)..(1188): n is a, c, g, or t
  misc_feature (1196)..(1196): n is a, c, g, or t
  misc_feature (1198)..(1198): n is a, c, g, or t
  misc_feature (1203)..(1203): n is a, c, g, or t
  misc_feature (1207)..(1207): n is a, c, g, or t
  misc_feature (1220)..(1221): n is a, c, g, or t
  misc_feature (1229)..(1229): n is a, c, g, or t
  misc_feature (1231)..(1231): n is a, c, g, or t
  misc_feature (1241)..(1241): n is a, c, g, or t
  misc_feature (1250)..(1250): n is a, c, g, or t
  misc_feature (1260)..(1260): n is a, c, g, or t
  misc_feature (1266)..(1266): n is a, c, g, or t
  misc_feature (1268)..(1268): n is a, c, g, or t
  misc_feature (1270)..(1270): n is a, c, g, or t
  misc_feature (1275)..(1275): n is a, c, g, or t
aagaganattactatgagaggatcgcatcaccatcaccatcacggatcctatttaggtgacactatagaatcgtcgacccacgcgtccgcggcttctcaggcggtggaggaaatgcggagccgcgtggttctgggggagtttggggttcgcaatgtccatactactgactttcccggtaactattccggttatgatgatgcctgggaccaggaccgcttcgagaagaatttccgtgtggatgtagtacacatggatgaaaactcactggagtttgacatggtgggaattgacgcagccattgccaatgcttttcgacgaattctgctagctgaggtgccaactatggctgtggagaaggtcctggtgtacaataatacatccattgttcaggatgagattcttgctcaccgtctggggctcattcccattcatgctgatccccgtctttttgagtatcggaaccaaggtgagaaaatgaaattttgggagaagtggactatctgggttcaaatcctggttgactgtgatgttgggtaagttacttatctttgtacatcagtgtctttcatctgtgagaacacttgccttgtctcccaagtttgccataattaaatgggaaacacgtaaagcattcagcatagtgctggcactcagacgtttactagttcttaggagctccctccatttgtgcaggagatgaagaaggcacagagatagatactctacagtttcgtctccaggtcagatgcactcggaacccccatgctgctaaagattcctctgaccccaacgaactgtacgtgaaccacaaagtgtataccaggcatatgacatggatccccctggggaaccaggctgatctctttccaganggcactatccgaccagtgcatgatgatatcctcatcgctcagctgcggcctggccaanaaattgacctgctcatgcactgtgtcaagggcatnggcaaaaatcatgccaagttttcnccanngncaacanccagttacagggctcctgccaaanatcnccctgcttgaaccccgtggaaggggannccacctnangaattnaaccaggggcttcccncctgggttatngaggngcnagaaancccangnaaaaaaggggccaaaatnncnacccccgctggaaaccttnnccaaaaaannttccgaaagaaaacnaaaaaagntntgaancttncccggttcaaaannttaatctncnttttaaccangggggtttnccccaaaggncggganananccccnaa

SEQ ID NO: 51 - DNA, 1317 bp, Homo Sapiens
  misc_feature (827)..(827): n is a, c, g, or t
  misc_feature (858)..(858): n is a, c, g, or t
  misc_feature (898)..(898): n is a, c, g, or t
  misc_feature (906)..(906): n is a, c, g, or t
  misc_feature (920)..(920): n is a, c, g, or t
  misc_feature (936)..(936): n is a, c, g, or t
  misc_feature (939)..(939): n is a, c, g, or t
  misc_feature (960)..(960): n is a, c, g, or t
  misc_feature (971)..(971): n is a, c, g, or t
  misc_feature (979)..(979): n is a, c, g, or t
  misc_feature (981)..(982): n is a, c, g, or t
  misc_feature (988)..(988): n is a, c, g, or t
  misc_feature (991)..(991): n is a, c, g, or t
  misc_feature (1001)..(1001): n is a, c, g, or t
  misc_feature (1003)..(1003): n is a, c, g, or t
  misc_feature (1007)..(1007): n is a, c, g, or t
  misc_feature (1012)..(1012): n is a, c, g, or t
  misc_feature (1020)..(1020): n is a, c, g, or t
  misc_feature (1022)..(1022): n is a, c, g, or t
  misc_feature (1027)..(1027): n is a, c, g, or t
  misc_feature (1031)..(1031): n is a, c, g, or t
  misc_feature (1038)..(1038): n is a, c, g, or t
  misc_feature (1056)..(1056): n is a, c, g, or t
  misc_feature (1058)..(1058): n is a, c, g, or t
  misc_feature (1089)..(1089): n is a, c, g, or t
  misc_feature (1105)..(1105): n is a, c, g, or t
  misc_feature (1113)..(1113): n is a, c, g, or t
  misc_feature (1122)..(1122): n is a, c, g, or t
  misc_feature (1132)..(1132): n is a, c, g, or t
  misc_feature (1135)..(1135): n is a, c, g, or t
  misc_feature (1143)..(1144): n is a, c, g, or t
  misc_feature (1157)..(1157): n is a, c, g, or t
  misc_feature (1175)..(1175): n is a, c, g, or t
  misc_feature (1186)..(1186): n is a, c, g, or t
  misc_feature (1189)..(1190): n is a, c, g, or t
  misc_feature (1203)..(1203): n is a, c, g, or t
  misc_feature (1210)..(1210): n is a, c, g, or t
  misc_feature (1216)..(1216): n is a, c, g, or t
  misc_feature (1231)..(1231): n is a, c, g, or t
  misc_feature (1235)..(1236): n is a, c, g, or t
  misc_feature (1247)..(1247): n is a, c, g, or t
  misc_feature (1249)..(1249): n is a, c, g, or t
  misc_feature (1253)..(1253): n is a, c, g, or t
  misc_feature (1273)..(1273): n is a, c, g, or t
  misc_feature (1277)..(1277): n is a, c, g, or t
  misc_feature (1280)..(1281): n is a, c, g, or t
  misc_feature (1287)..(1287): n is a, c, g, or t
  misc_feature (1292)..(1292): n is a, c, g, or t
  misc_feature (1298)..(1298): n is a, c, g, or t
  misc_feature (1308)..(1309): n is a, c, g, or t
tagagaaattaactatgagaggatcgcatcaccatcaccatcacggatcctatttaggtgacactatagaatcgtcgacccacgcgtccgcttgtaaagctgttctcaacccactttgtcaggttgattatcgagcaaaactttgggcctgtaatttctgttttcaaagaaatcagtttcctccagcttatggaggcatatctgaggtgaatcaacctgccgaattgatgccccagttttctacaattgagtacgtgatacagcgaggtgctcagtcccctctgatctttctctatgtggttgacacatgcctggaggaagatgaccttcaagcactcaaagagtccctgcagatgtccctgagtcttcttcctccagatgctctggtgggtctgatcacatttggaaggatggtgcaggttcatgagctaagctgtgaaggaatctccaaaagttatgtcttccgagggaccaaggatttaactgcaaagcaaatacaggatatgttgggcctgaccaagccagccatgcccatgcagcaagcacgacctgcacaaccacaggagcacccttttgcttcaagcagatttctgcagcctgttcacaagattgatatgaacctcactgatcttcttggggagctacagagggacccatggccagtaactcaggggaagagacctttgcgatccactggtgtggctttgtccattgctgttggcttgctggagggcacttttccaaacacaggagccaggatcatgctgtttactggaggtccccctacccaagggcctggcatggtgggttggagatgaattaaagantcctattccgttcttggcatgataattgaanaaaaaataatgcacgattcatgaaaaaaggcaaccaagcncctatganatgcttgctaatcnaacagctgcaaatggnccnctgcaatgaaatttatgcttngggcccttgancaaaccgnanntttggnaangaaggttggncnaaanctaangggaggcnanatggnaaangggaaanttctttcaaaacctttcncncttcaagccaaaatttcccaaaaaaactttnataaagaattttaaanggaaattnccaaaaggnatttggggcnctntttggaannaaaacccccccgnaaataaaaattccggaancctttggcccnggnnaaattccaaaagnaaaaaanccgggnggtccaaaaaaaacntggnntttgggccaancnaganaaactggggccaaaaccccncccnccnngggccnttttngaggtncaccacccanncccccccc

SEQ ID NO: 52 - DNA, 1179 bp, Homo Sapiens
  misc_feature (895)..(895): n is a, c, g, or t
  misc_feature (966)..(966): n is a, c, g, or t
  misc_feature (977)..(977): n is a, c, g, or t
  misc_feature (1001)..(1001): n is a, c, g, or t
  misc_feature (1057)..(1057): n is a, c, g, or t
  misc_feature (1063)..(1063): n is a, c, g, or t
  misc_feature (1070)..(1070): n is a, c, g, or t
  misc_feature (1075)..(1075): n is a, c, g, or t
  misc_feature (1084)..(1085): n is a, c, g, or t
  misc_feature (1096)..(1096): n is a, c, g, or t
  misc_feature (1100)..(1100): n is a, c, g, or t
  misc_feature (1103)..(1103): n is a, c, g, or t
  misc_feature (1106)..(1106): n is a, c, g, or t
  misc_feature (1118)..(1118): n is a, c, g, or t
  misc_feature (1123)..(1123): n is a, c, g, or t
  misc_feature (1137)..(1137): n is a, c, g, or t
  misc_feature (1142)..(1144): n is a, c, g, or t
  misc_feature (1152)..(1152): n is a, c, g, or t
  misc_feature (1154)..(1154): n is a, c, g, or t
  misc_feature (1157)..(1157): n is a, c, g, or t
  misc_feature (1163)..(1163): n is a, c, g, or t
  misc_feature (1165)..(1165): n is a, c, g, or t
  misc_feature (1172)..(1173): n is a, c, g, or t
  misc_feature (1178)..(1178): n is a, c, g, or t
agagaaattactatgagaggatcgcatcaccatcaccatcacggatcctatttaggtgacactatagaatcgtcgacccacgcgtccggccgctctctccgctattactatgaaaagggcatcatgcagaaggtggctggagagcgatacgtctacaaatttgtctgtgacccagatgccctcttctccatggctttcccggataaccagcgtccgttcctgaaggcagagtccgagtgccacctcagcgaggaggacaccctgccgctgacccactttgaagacagccccgcttacctcctggacatggaccgctgcagcagcctcccctatgccgaaggctttgcttactaagtttctgagtggcggagtggccaaaccctagagctagcagttcccattcaggcaaacaagggcagtggttttgtttgtgtttttggttgttcctaaagcttgccctttgagtattatctggagaacccaagctgtctctggattggcacccttaaagacagatacattggctggggagtgggaacagggaggggcagaaaaccaccaaaaggccagtgcctcaactcttgattctgatgaggtttctgggaagagatcaaaatggagtctccttaccatggacaatacatgcaaagcaatatcttgttcaggttagtacccgcaaaacgggacatagtatgtgacaatctgcatcgatcatggactactaaatgcctttacatagaagggctctgatttgcacaatttgttgaaaaatcacaaacccatagaaaagtaagtaggctaagttggggaggctcaaaccattaagggttaaaaatacatcttaaacattggaaaagctcttctagctgaatctgaaatattaccccttgtctanaaaaaggggggcagtcaaaacagctgttccccactccgtggttctcaaaatcataaaccatggctactctngggaacccccnggccatgggggtccccaagtaaancaagccccctttctcttcccaatcacgtggctgaatggggatgacttttattttangaaaanggggatnaaacnttttgaaannatttttgtttngccnganttnggggaatgtttngtttngggggttttttggnaaaannnttaaaaancnganttttgnantttgggnntttang

SEQ ID NO: 53 - DNA, 1064 bp, Homo Sapiens
  misc_feature (1)..(1): n is a, c, g, or t
  misc_feature (678)..(678): n is a, c, g, or t
  misc_feature (721)..(721): n is a, c, g, or t
  misc_feature (824)..(824): n is a, c, g, or t
  misc_feature (830)..(830): n is a, c, g, or t
  misc_feature (833)..(833): n is a, c, g, or t
  misc_feature (852)..(852): n is a, c, g, or t
  misc_feature (859)..(859): n is a, c, g, or t
  misc_feature (863)..(863): n is a, c, g, or t
  misc_feature (891)..(891): n is a, c, g, or t
  misc_feature (898)..(898): n is a, c, g, or t
  misc_feature (901)..(901): n is a, c, g, or t
  misc_feature (907)..(907): n is a, c, g, or t
  misc_feature (910)..(910): n is a, c, g, or t
  misc_feature (943)..(943): n is a, c, g, or t
  misc_feature (948)..(949): n is a, c, g, or t
  misc_feature (955)..(955): n is a, c, g, or t
  misc_feature (964)..(964): n is a, c, g, or t
  misc_feature (966)..(966): n is a, c, g, or t
  misc_feature (995)..(995): n is a, c, g, or t
  misc_feature (997)..(997): n is a, c, g, or t
  misc_feature (1000)..(1000): n is a, c, g, or t
  misc_feature (1006)..(1006): n is a, c, g, or t
  misc_feature (1019)..(1019): n is a, c, g, or t
  misc_feature (1025)..(1025): n is a, c, g, or t
  misc_feature (1031)..(1031): n is a, c, g, or t
  misc_feature (1033)..(1033): n is a, c, g, or t
  misc_feature (1039)..(1039): n is a, c, g, or t
  misc_feature (1052)..(1052): n is a, c, g, or t
  misc_feature (1056)..(1056): n is a, c, g, or t
  misc_feature (1063)..(1064): n is a, c, g, or t
ntagagaaattactatgagaggatcgcatcaccatcaccatcacggatcctatttaggtgacactatagaatcgtcgacccacgcgtccgatgatacaagagccggctggtggaagagtggggaccagaaagagaatttgctgaagaggagaaggaaaaaaaaaacaccaaaaaaaaaaaataaaaaaatccacacacacaaaaaaacctgcgcgtgaggggggaggaaaagcagggccttttaaaaaggcaatcacaacaacttttgctgccaggatgcccttgctttggctgagaggatttctgttggcaagttgctggattatagtgaggagttcccccaccccaggatccgaggggcacagcgcggcccccgactgtccgtcctgtgcgctggccgccctcccaaaggatgtacccaactctcagccagagatggtggaggccgtcaagaagcacattttaaacatgctgcacttgaagaagagacccgatgtcacccagccggtacccaaggcggcgcttctgaacgcgatcagaaagcttcatgtgggcaaagtcggggagaacgggtatgtggagatagaggatgacattggaaggagggcagaaatgaatgaacttatggagcagacctcggagatcatcacgtttgccgagtcaggaacagccaggaanacgctgcacttcgagatttccaaggaaggcagtgacctgtcantggtggagcgtgcagaagtctggctcttcctaaaagtccccaaggccaacaggaccaggaccaaaagtcaccatccgcctcttccagcagcagaaagcacccncagggncancttgggacacaggggaaanaaggccnaagnaagtgggcctttaaagggggaaaaggantgaactnttncctctnctnaaaaagtaataaaccctcggaaaaacccctggnatgtnnttcctntctccaacnanatccaggggttgctggaccagggcaaaancnccntggaanttcggattgcctnttaaanatgccnanaaaagnggcgccactttgntttncctgggnn

SEQ ID NO: 54 - DNA, 1039 bp, Homo Sapiens
  misc_feature (4)..(4): n is a, c, g, or t
  misc_feature (721)..(724): n is a, c, g, or t
  misc_feature (726)..(742): n is a, c, g, or t
  misc_feature (786)..(786): n is a, c, g, or t
  misc_feature (791)..(791): n is a, c, g, or t
  misc_feature (868)..(868): n is a, c, g, or t
  misc_feature (871)..(871): n is a, c, g, or t
  misc_feature (874)..(874): n is a, c, g, or t
  misc_feature (893)..(893): n is a, c, g, or t
  misc_feature (899)..(899): n is a, c, g, or t
  misc_feature (964)..(964): n is a, c, g, or t
  misc_feature (975)..(975): n is a, c, g, or t
  misc_feature (979)..(979): n is a, c, g, or t
  misc_feature (994)..(994): n is a, c, g, or t
  misc_feature (1007)..(1007): n is a, c, g, or t
  misc_feature (1013)..(1013): n is a, c, g, or t
  misc_feature (1017)..(1017): n is a, c, g, or t
  misc_feature (1031)..(1031): n is a, c, g, or t
caantagagaaaattactatgagaggatcgcatcaccatcaccattcacggatcctatttaggtgacactatagaatcgtcgacccacgcgtccgaagacaacagcttgctcaaccagggcttcttgcaggccaagcccgagaaggcagcagtggcccagaagccccgaagccacttcacgacacctgcccctatgtccagtgcctggaagacggtggcctgcggggggaccagggaccagcttttcatgcaggagaaagcccggcagctcctgggccgcctgaagcccagccacacatctcggaccctcatcttgtcctgaggtgttgagggtgtcacgagcccattctcatgtttacaggggttgtgggggcagagggggtctgtgaatctgagagtcattcaggtgacctcctgcagggagccttctgccaccagcccctccccagactctcaggtggaggcaacagggccatgtgctgccctgttgccgagcccagctgtgggcggctcctggtgctaacaacaaagttccacttccaggtctgcctggttccctccccaaggccacagggagctccgtcagcttctcccaagcccacgtcaggcctggcctcatctcagaccctgcttaggatgggggatgtggccaggggtgctcctgtgctcaccctctcttggtgcatttttttggaagaataaaattgcctctctcttaaannnnannnnnnnnnnnnnnnnnaaagggcggccgctccctatagtgagtcgtattaacttaattanctgancttggactcctgtttgataaatccagtaatgacctcaaaactccatctggaattttgtttcaaaaacgctcggttgnccnccngggcgtttttttattgggngaaaantccaagctaagcttgggcgaaaatttttcagggagctaaggaaagctaaaatggaaaaaaaaaanccccttggaanatanccacccgtttgaaantttccccaatggncatctnaaanaaaatttttgaggnatttcaat

SEQ ID NO: 55 - DNA, 1178 bp, Homo Sapiens
  misc_feature (8)..(8): n is a, c, g, or t
  misc_feature (15)..(15): n is a, c, g, or t
  misc_feature (18)..(19): n is a, c, g, or t
  misc_feature (22)..(22): n is a, c, g, or t
  misc_feature (38)..(38): n is a, c, g, or t
  misc_feature (67)..(67): n is a, c, g, or t
  misc_feature (73)..(73): n is a, c, g, or t
  misc_feature (82)..(82): n is a, c, g, or t
  misc_feature (87)..(87): n is a, c, g, or t
  misc_feature (105)..(105): n is a, c, g, or t
  misc_feature (114)..(114): n is a, c, g, or t
  misc_feature (936)..(936): n is a, c, g, or t
  misc_feature (938)..(938): n is a, c, g, or t
  misc_feature (953)..(953): n is a, c, g, or t
  misc_feature (962)..(962): n is a, c, g, or t
  misc_feature (973)..(973): n is a, c, g, or t
  misc_feature (983)..(983): n is a, c, g, or t
  misc_feature (990)..(990): n is a, c, g, or t
  misc_feature (1000)..(1000): n is a, c, g, or t
  misc_feature (1002)..(1002): n is a, c, g, or t
  misc_feature (1005)..(1005): n is a, c, g, or t
  misc_feature (1007)..(1007): n is a, c, g, or t
  misc_feature (1012)..(1012): n is a, c, g, or t
  misc_feature (1019)..(1019): n is a, c, g, or t
  misc_feature (1066)..(1066): n is a, c, g, or t
  misc_feature (1069)..(1069): n is a, c, g, or t
  misc_feature (1071)..(1071): n is a, c, g, or t
  misc_feature (1077)..(1077): n is a, c, g, or t
  misc_feature (1082)..(1082): n is a, c, g, or t
  misc_feature (1085)..(1085): n is a, c, g, or t
  misc_feature (1099)..(1099): n is a, c, g, or t
  misc_feature (1136)..(1136): n is a, c, g, or t
  misc_feature (1138)..(1138): n is a, c, g, or t
  misc_feature (1141)..(1141): n is a, c, g, or t
  misc_feature (1144)..(1144): n is a, c, g, or t
  misc_feature (1153)..(1153): n is a, c, g, or t
  misc_feature (1161)..(1161): n is a, c, g, or t
  misc_feature (1170)..(1170): n is a, c, g, or t
  misc_feature (1178)..(1178): n is a, c, g, or t
gaataganagaattnccnntgngaggatcgcatccccntctccatcacggatcctatttaggtgacnctatantaatcgtcnacccncgcgtccgcgcgcctgcncgtacgtanccttcacgtgtgtgtggatacggagtgcatgtgtggagacagaggaatatgctccaacaaatttcggatagaggcgccgaagacaggacgtggggaagctaaagaagtaaacaggtcatggcacgtttaacaaaaagacgacaggcggatacaaaagctatccagcatctttgggcagccattgagattatacggaaccagaagcagattgccaacattgaccgtattacaaagtatatgtctcgagtccacggtatgcaccctaaagagaccacccgtcagctgagcttagctgtgaaagatggtcttattgtcgaaactctaacagtgggctgcaaaggttcaaaagctggtattgaacaagaaggatattggttgccaggagatgagattagcattaagaagaagaatacaaacaaacaggagatgggcacatacctcagattcattgtctcccgcatgaaggagagggctatagatcttaataaaaaggggaaggacaataaacacccgatgtacaggaggctggtgcactcagctgtggacgttcccaccattcaagagaaagtgaatgaagggaaataccgaagttatgaagagttcaaagctgatgcccaattgcttctccacaataccgtgattttctatggagcagacagtgagcaagctgacattgcgaggatgctatataaagacacatgtcatgagctggatgaactgcagctttgcaagaattgcttttacttgtcaaatgctcgtcctgacaactggttctgttatccttgtatacctaatcatgagctggtttgggctaaaatgaangntttgggttttggccncccaagtcntgcaaaagaanacatcagtcnacgttcnctcttggccncnccncngaggnccggatncttctgaaacattcaaaaatccagtcacttctcggctgccgtgaacncantnggttgnaaaangcngtgataactgactnctcccgttccacaaagggaattggaatctaaatgagncnagnggnaaagccaancctttccncccctatgnccctaagn

SEQ ID NO: 56 - DNA, 1155 bp, Homo Sapiens
  misc_feature (900)..(900): n is a, c, g, or t
  misc_feature (919)..(919): n is a, c, g, or t
  misc_feature (927)..(927): n is a, c, g, or t
  misc_feature (976)..(976): n is a, c, g, or t
  misc_feature (984)..(984): n is a, c, g, or t
  misc_feature (992)..(992): n is a, c, g, or t
  misc_feature (994)..(994): n is a, c, g, or t
  misc_feature (999)..(999): n is a, c, g, or t
  misc_feature (1013)..(1013): n is a, c, g, or t
  misc_feature (1015)..(1015): n is a, c, g, or t
  misc_feature (1019)..(1019): n is a, c, g, or t
  misc_feature (1023)..(1023): n is a, c, g, or t
  misc_feature (1032)..(1032): n is a, c, g, or t
  misc_feature (1038)..(1038): n is a, c, g, or t
  misc_feature (1046)..(1046): n is a, c, g, or t
  misc_feature (1055)..(1055): n is a, c, g, or t
  misc_feature (1068)..(1068): n is a, c, g, or t
  misc_feature (1077)..(1077): n is a, c, g, or t
  misc_feature (1082)..(1082): n is a, c, g, or t
  misc_feature (1084)..(1084): n is a, c, g, or t
  misc_feature (1088)..(1088): n is a, c, g, or t
  misc_feature (1097)..(1097): n is a, c, g, or t
  misc_feature (1102)..(1102): n is a, c, g, or t
  misc_feature (1106)..(1107): n is a, c, g, or t
  misc_feature (1110)..(1110): n is a, c, g, or t
  misc_feature (1112)..(1112): n is a, c, g, or t
  misc_feature (1123)..(1124): n is a, c, g, or t
  misc_feature (1132)..(1132): n is a, c, g, or t
  misc_feature (1134)..(1134): n is a, c, g, or t
  misc_feature (1144)..(1145): n is a, c, g, or t
  misc_feature (1149)..(1149): n is a, c, g, or t
  misc_feature (1151)..(1151): n is a, c, g, or t
tagagaaattactatgagaggatcgcatcaccatcaccatcacggatcctatttaggtgacactatagaatcgtcgacccacgcgtccgggaggagccagcggaaggacggtgtgcgggccggccagccctggacgaaagaagagggcccctccaggccagtctgggcaccctgggatagcggctgcagccaggcatggccgactctgcacaggcccagaagctggtgtacctggtcacagggggctgtggcttcctgggagagcacgtggtgcgaatgctgctgcagcgggagccccggctcggggagctgcgggtctttgaccaacacctgggtccctggctggaggagctgaagacagggcctgtgagggtgactgccatccagggggacgtgacccaggcccatgaggtggcagcagctgtggccggagcccatgtggtcatccacacggctgggctggtagacgtgtttggcagggccagtcccaagaccatccatgaggtcaacgtgcagggtacccggaacgtgatcgaggcttgtgtgcagaccggaacacggttcctggtctacaccagcagcatggaagttgtggggcctaacaccaaaggtcaccccttctacaggggcaacgaagacaccccatacgaagcagtgcacaggcacccctatccttgcagcaaggccctggccgagtggctggtcctggaggccaacgggaggaaggtccgtggggggctgcccctggtgacgtgtgcccttcgtcccacgggcatctacggtgaaggccaccagatcatgagggacttctaccgccagggcctgcgcctgggaagttggctcttccgggccatcccggcctctgtggagcatggccgggtctatgtgggcaatgttgcntggatgcacgtgctggcancccggganctggaacaccgggcaaccctgatgggcggccaggtatacttctgctacnatggatcncctacagnanctacnaagatttcacatgnanttcntggnccctgcgantgcggntgggggcnccccccatngctgcctactggntgctgggtnctggntncctnatgccctgntgaanggtnntgngncatggtgtttnncaccctgntnaaccctaacnntggngnggca

SEQ ID NO: 57 - DNA, 1139 bp, Homo Sapiens
  misc_feature (1)..(1): n is a, c, g, or t
  misc_feature (4)..(4): n is a, c, g, or t
  misc_feature (824)..(824): n is a, c, g, or t
  misc_feature (836)..(836): n is a, c, g, or t
  misc_feature (847)..(847): n is a, c, g, or t
  misc_feature (852)..(852): n is a, c, g, or t
  misc_feature (854)..(854): n is a, c, g, or t
  misc_feature (860)..(860): n is a, c, g, or t
  misc_feature (894)..(894): n is a, c, g, or t
  misc_feature (911)..(911): n is a, c, g, or t
  misc_feature (928)..(928): n is a, c, g, or t
  misc_feature (933)..(933): n is a, c, g, or t
  misc_feature (945)..(945): n is a, c, g, or t
  misc_feature (965)..(965): n is a, c, g, or t
  misc_feature (977)..(977): n is a, c, g, or t
  misc_feature (982)..(982): n is a, c, g, or t
  misc_feature (992)..(992): n is a, c, g, or t
  misc_feature (1012)..(1012): n is a, c, g, or t
  misc_feature (1018)..(1018): n is a, c, g, or t
  misc_feature (1024)..(1025): n is a, c, g, or t
  misc_feature (1030)..(1030): n is a, c, g, or t
  misc_feature (1035)..(1035): n is a, c, g, or t
  misc_feature (1038)..(1038): n is a, c, g, or t
  misc_feature (1042)..(1042): n is a, c, g, or t
  misc_feature (1044)..(1044): n is a, c, g, or t
  misc_feature (1047)..(1047): n is a, c, g, or t
  misc_feature (1051)..(1051): n is a, c, g, or t
  misc_feature (1066)..(1066): n is a, c, g, or t
  misc_feature (1071)..(1071): n is a, c, g, or t
  misc_feature (1080)..(1080): n is a, c, g, or t
  misc_feature (1084)..(1084): n is a, c, g, or t
  misc_feature (1086)..(1086): n is a, c, g, or t
  misc_feature (1095)..(1095): n is a, c, g, or t
  misc_feature (1116)..(1116): n is a, c, g, or t
  misc_feature (1118)..(1118): n is a, c, g, or t
  misc_feature (1132)..(1132): n is a, c, g, or t
  misc_feature (1135)..(1135): n is a, c, g, or t
naantagagaaattactatgagaggatcgcatcaccatcaccatcacggatcctatttaggtgacactatagaatcgtcgacccacgcgtccgcggaggacgcgatggctcccaagaaacgcccagaaacccagaagacctccgagattgtattacgccccaggaacaagaggagcaggagtcccctggagctggagcccgaggccaagaagctctgtgcgaagggctccggtcctagcagaagatgtgactcagactgcctctgggtggggctggctggcccacagatcctgccaccatgccgcagcatcgtcaggaccctccaccagcataagctgggcagagcttcctggccatctgtccagcaggggctccagcagtcctttttgcacactctggattcttaccggatattacaaaaggctgccccctttgacaggagggctacatccttggcgtggcacccaactcaccccagcaccgtggctgtgggttccaaagggggagatatcatgctctggaattttggcatcaaggacaaacccaccttcatcaaaggggcagcctggcatcctcgctacaacctcattgttgtgggccgatacccagatcctaatttcaaaagttgtaccccttatgaattgaggacgatcgacgtgttcgatggaaactcagggaagatgatgtgtcagctctatgacccagaatcttctggcatcagttcgcttaatgaattcaatcccatgggggacacgctggcctctgcaatgggttaccacattctcatctggagccaggaggaagccaggacacggaagtgaganacactaaagaangtgtgggccanacaangncttggnagcccacacatgggatcaagtcctgcaagcaaangtggcgatttgttaaanggccaaaagtatccaangttanggttggaaacangggtgctgggaccttggggncactgttggganctggnaaactttttntgtttaaggctctggaattnccctcnaaaaannctccnaaatnggnaaananctntccnaagggcccttctgtntttancctggaacnaggntntttttgaancaaatgactttttcccccccnangggggggtaccaanggnatca

SEQ ID NO: 58 - DNA, 1171 bp, Homo Sapiens
  misc_feature (879)..(879): n is a, c, g, or t
  misc_feature (923)..(923): n is a, c, g, or t
  misc_feature (935)..(935): n is a, c, g, or t
  misc_feature (1003)..(1003): n is a, c, g, or t
  misc_feature (1021)..(1021): n is a, c, g, or t
  misc_feature (1031)..(1031): n is a, c, g, or t
  misc_feature (1051)..(1051): n is a, c, g, or t
  misc_feature (1054)..(1054): n is a, c, g, or t
  misc_feature (1059)..(1059): n is a, c, g, or t
  misc_feature (1064)..(1064): n is a, c, g, or t
  misc_feature (1073)..(1073): n is a, c, g, or t
  misc_feature (1081)..(1081): n is a, c, g, or t
  misc_feature (1083)..(1083): n is a, c, g, or t
  misc_feature (1085)..(1085): n is a, c, g, or t
  misc_feature (1098)..(1098): n is a, c, g, or t
  misc_feature (1102)..(1102): n is a, c, g, or t
  misc_feature (1117)..(1117): n is a, c, g, or t
  misc_feature (1132)..(1132): n is a, c, g, or t
  misc_feature (1137)..(1137): n is a, c, g, or t
  misc_feature (1139)..(1139): n is a, c, g, or t
  misc_feature (1143)..(1143): n is a, c, g, or t
  misc_feature (1150)..(1150): n is a, c, g, or t
  misc_feature (1153)..(1154): n is a, c, g, or t
  misc_feature (1158)..(1158): n is a, c, g, or t
  misc_feature (1160)..(1160): n is a, c, g, or t
  misc_feature (1167)..(1167): n is a, c, g, or t
attagagaaattactatgagaggatcgcatcaccatcaccatcacggatcctatttaggtgacactatagaatcgtcgacccacgcgtccggaggcaggaaccggagcgcgagcagtagctgggtgggcaccatggctgggatcaccaccatcgaggcggtgaagcgcaagatccaggttctgcagcagcaggcagatgatgcagaggagcgagctgagcgcctccagcgagaagttgagggagaaaggcgggcccgggaacaggctgaggctgaggtggcctccttgaaccgtaggatccagctggttgaagaagagctggaccgtgctcaggagcgcctggccactgccctgcaaaagctggaagaagctgaaaaagctgctgatgagagtgagagaggtatgaaggttattgaaaaccgggccttaaaagatgaagaaaagatggaactccaggaaatccaactcaaagaagctaagcacattgcagaagaggcagataggaagtatgaagaggtggctcgtaagttggtgatcattgaaggagacttggaacgcacagaggaacgagctgagctggcagagtcccgttgccgagagatggatgagcagattagactgatggaccagaacctgaagtgtctgagtgctgctgaagaaaagtactctcaaaaagaagataaatatgaggaagaaatcaagattcttactgataaactcaaggaggcagagacccgtgctgagtttgctgagagatcggtagccaagctggaaaagacaattgatgacctggaagataaactgaaatgcaccaaagaggagcacctctgtacacaaaggatgctggaccagaccctgcttgacctgaatgagatgtanaacgccccagtcccaccctgctgctgctcctccctctgacccanactccgcctgangccagcctgcgggaagctgacctttactgagggctgatctttaactggaaggctgctttctcctttcncccccccctccttcctgngtctttttcnccaactgtctctgcctcttnccngaaantccanctgggctanaggctgancncntttggaaaccacntttnagggaatttgacccnatgcctaatgtcttnaaaancnggtnggggagnacnntttngnaataccntttt

SEQ ID NO: 59 - DNA, 1136 bp, Homo Sapiens
  misc_feature (9)..(9): n is a, c, g, or t
  misc_feature (764)..(764): n is a, c, g, or t
  misc_feature (836)..(836): n is a, c, g, or t
  misc_feature (859)..(859): n is a, c, g, or t
  misc_feature (917)..(917): n is a, c, g, or t
  misc_feature (944)..(944): n is a, c, g, or t
  misc_feature (952)..(952): n is a, c, g, or t
  misc_feature (962)..(962): n is a, c, g, or t
  misc_feature (964)..(964): n is a, c, g, or t
  misc_feature (968)..(968): n is a, c, g, or t
  misc_feature (974)..(974): n is a, c, g, or t
  misc_feature (985)..(985): n is a, c, g, or t
  misc_feature (990)..(990): n is a, c, g, or t
  misc_feature (993)..(993): n is a, c, g, or t
  misc_feature (996)..(996): n is a, c, g, or t
  misc_feature (1000)..(1000): n is a, c, g, or t
  misc_feature (1007)..(1007): n is a, c, g, or t
  misc_feature (1019)..(1019): n is a, c, g, or t
  misc_feature (1049)..(1049): n is a, c, g, or t
  misc_feature (1052)..(1052): n is a, c, g, or t
  misc_feature (1060)..(1060): n is a, c, g, or t
  misc_feature (1068)..(1068): n is a, c, g, or t
  misc_feature (1079)..(1079): n is a, c, g, or t
  misc_feature (1089)..(1089): n is a, c, g, or t
  misc_feature (1118)..(1120): n is a, c, g, or t
  misc_feature (1124)..(1125): n is a, c, g, or t
  misc_feature (1129)..(1129): n is a, c, g, or t
  misc_feature (1136)..(1136): n is a, c, g, or t
tagagaaanttactatgagaggatcgcatcaccatcaccatcacggatcctatttaggtgacactatagaatcgtcgacccacgcgtccgctcgctgcaaaggctctgagccccaggttgggcccatcccagaggcagcaggtagcagtgagctgcaggttgggcccatcccagaaggaggcagcaacaagccccagcacatggcagaggaggggccggggcaagcagaagtcgagaagctccaggaagaacttaaagtggagcccctggaggaagtggccagggtgaaagaagaggtgtgggaggagaccactgtgaagggggaggagatagagcccaggctggagactgccgagaagggctgccagactgaagccagctctgagcggcccttcagctgcgaggtgtgtggccgatcctacaagcacgccggcagcctcatcaaccaccggcagagccaccagaccggccactttggctgtcaggcctgctccaagggcttctcaaacctcatgtccctcaagaaccaccggcgcatccatgcagatccccgacgtttccgctgcagcgagtgtgggaaggccttccgcctgcggaaacagctggccagccaccagcgggtccacatggaacggcgtgggggtgggggcacccgaaaggcgactcgggaagatcggcccttccgctgtgggcagtgcgggcggacctatcgccacgccggcagcctcctgaaccaccggcgcagccacgagacgggccagtanagctgccccacctgccccaagacctactccaaccgcatggccctgaaggaccaccagaagctgcactcaaanaatcggcggcgacgggcctgganggtccaggcgcacagctgtgcgttgcgccctctgtggccgcaccttccctggccgggnatttttggagcggcccctgcgggaacntgaggganacaaaaaggnanccanccaatngccagggaagncttgnatnggnacancgcccanttgaggcgaacntgattggcaacccagggaataaaaaaccanttngggtgggngcttgaanccattaccccncttttggaanaatggaattccccaagccaaggggaagcnnnaatnnaaanccctttn

SEQ ID NO: 60 - DNA, 1179 bp, Homo Sapiens
  misc_feature (805)..(805): n is a, c, g, or t
  misc_feature (907)..(907): n is a, c, g, or t
  misc_feature (925)..(925): n is a, c, g, or t
  misc_feature (928)..(928): n is a, c, g, or t
  misc_feature (964)..(964): n is a, c, g, or t
  misc_feature (1000)..(1000): n is a, c, g, or t
  misc_feature (1016)..(1016): n is a, c, g, or t
  misc_feature (1024)..(1024): n is a, c, g, or t
  misc_feature (1044)..(1044): n is a, c, g, or t
  misc_feature (1046)..(1046): n is a, c, g, or t
  misc_feature (1063)..(1063): n is a, c, g, or t
  misc_feature (1072)..(1072): n is a, c, g, or t
  misc_feature (1077)..(1077): n is a, c, g, or t
  misc_feature (1080)..(1080): n is a, c, g, or t
  misc_feature (1086)..(1086): n is a, c, g, or t
  misc_feature (1088)..(1088): n is a, c, g, or t
  misc_feature (1092)..(1092): n is a, c, g, or t
  misc_feature (1099)..(1099): n is a, c, g, or t
  misc_feature (1115)..(1115): n is a, c, g, or t
  misc_feature (1118)..(1118): n is a, c, g, or t
  misc_feature (1121)..(1121): n is a, c, g, or t
  misc_feature (1133)..(1133): n is a, c, g, or t
  misc_feature (1141)..(1141): n is a, c, g, or t
  misc_feature (1143)..(1143): n is a, c, g, or t
  misc_feature (1145)..(1145): n is a, c, g, or t
  misc_feature (1151)..(1151): n is a, c, g, or t
  misc_feature (1161)..(1161): n is a, c, g, or t
  misc_feature (1164)..(1164): n is a, c, g, or t
tagagaaattactatgagaggatcgcatcaccatcaccatcacggatcctatttaggtgacactatagaatcgtcgacccacgcgtccgacatgatcagcctcttcattaaagacaccaccaccagcacagagcagatgctgtcccatggcaccgctgatgtggtcttagaggcctgcacagacttctgggacggagctgacatctaccctctctcgggatctgacagaaagaaagtgctggacttctaccagcgagcctgcctgtctgggtattgctctgccttcgcctacaagcccatgaactgcgccctgtcctctcagctcaatggcaagtgcatcgagctggtacaggtgcccggccaaagcagcatcttcaccatgtgcgagctgcccagcaccatccccatcaagcagaacgcccgccgcagcagctggagctctgacgggatcggggaggtgctggagaaggaagactgcatgcaggccctgagcggccagatcttcatgggcatggtgtcctcccagtaccaggcccggctggacatcgtgcgcctcattgatgggcttgtcaacgcctgcatccgctttgtctacttctctttggaggatgagctcaaaagcaaggtgtttgcagaaaaaatgggcctggagacaggctggaactgccacatctccctcacacccaatggtgacatgcctggctccgagatccccccctccagccccagccacgcaggctccctgcatgatgacctgaatcaggtgtcccgagatgatgcagaagggctcctcctcatggaggangagggccactcggacctcatcagcttccagcctacggacagcgacatccccagcttcctggaggactccaaccgggccaagctgccccggggtatccaccangtgcggccccacctgcanaanattgacaacgtgcccctgctagtgccccttttcacngactgcaccccaaaaaccatgtgtgaaatgataaanatcatgcaaaaatacnggggaggngaacctgctgcctgggcagntntgcaacctggggaaaanctgcctttncctcnaancgaatnancatngccctgnatccctgtaccatccngtngcnctgggaaacttnggtacccncnanatcaantggccagccncgnaggcttttccctgga

SEQ ID NO: 61 - DNA, 998 bp, Homo Sapiens
  misc_feature (16)..(16): n is a, c, g, or t
  misc_feature (90)..(90): n is a, c, g, or t
  misc_feature (867)..(867): n is a, c, g, or t
  misc_feature (905)..(905): n is a, c, g, or t
  misc_feature (920)..(920): n is a, c, g, or t
  misc_feature (955)..(955): n is a, c, g, or t
  misc_feature (960)..(960): n is a, c, g, or t
  misc_feature (973)..(973): n is a, c, g, or t
  misc_feature (977)..(998): n is a, c, g, or t
tttgaggaaaattacntatgagaggatgcatcaccatcaccatcacggatcctattttaggtgacactatagaatcgtcgacccacgcgntccgcccacgcgtccgccgaccccggccccacgggcggacactcggccgggcagccgcgggccgagcgcagccgcctccgccaccgatgcgcctggtggccagactccaagtgggaccggcggacacgcagcctcgcgtgtcaggggaagctgatggagaatcgagctctggatccagggactcgggactcctatggtgccaccagccacctccccaacaagggggccctggcgaaggtcaagaacaacttcaaagacttgatgtccaaactgacggagggccagtatgtgctgtgccggtggacagatggcctgtactacctcgggaagatcaagagggtcagcagctctaagcaaagctgcctcgtgactttcgaagataattccaaatactgggtcctatggaaggacatacagcatgccggtgttccaggagaggagcccaagtgcaacatctgcctagggaagacatcagggccgctgaatgagatcctcatctgcgggaagtgtggcctgggttaccaccagcagtgccacatccccatagcgggcagtgctgaccagcccctgctcacaccttggttctgccgacgctgtatcttcgcactggctgtgcgggtgagccttccatcctccccagtccctgcctctcctgcctcctccagtggggcagaccagagactcccatcacagagcctgagctccaagcagaagggccacacctgggctttggagacagatagcgcctctgccactgtccttggccaggatttgtanactccctgagcctcagtttcctcaactgtaaagtgganatgggtttggtgtcnggaataacggaccaataaatgatgctttactattnaaaanaaatcctgtaaanaaannnnnnnnnnnnnnnnnnnnnn

SEQ ID NO: 62 - DNA, 1321 bp, Homo Sapiens
  misc_feature (7)..(7): n is a, c, g, or t
  misc_feature (844)..(844): n is a, c, g, or t
  misc_feature (897)..(897): n is a, c, g, or t
  misc_feature (935)..(935): n is a, c, g, or t
  misc_feature (955)..(955): n is a, c, g, or t
  misc_feature (996)..(996): n is a, c, g, or t
  misc_feature (1011)..(1011): n is a, c, g, or t
  misc_feature (1019)..(1019): n is a, c, g, or t
  misc_feature (1033)..(1034): n is a, c, g, or t
  misc_feature (1039)..(1039): n is a, c, g, or t
  misc_feature (1049)..(1050): n is a, c, g, or t
  misc_feature (1065)..(1065): n is a, c, g, or t
  misc_feature (1067)..(1067): n is a, c, g, or t
  misc_feature (1071)..(1071): n is a, c, g, or t
  misc_feature (1083)..(1083): n is a, c, g, or t
  misc_feature (1092)..(1092): n is a, c, g, or t
  misc_feature (1101)..(1101): n is a, c, g, or t
  misc_feature (1107)..(1107): n is a, c, g, or t
  misc_feature (1114)..(1114): n is a, c, g, or t
  misc_feature (1118)..(1119): n is a, c, g, or t
  misc_feature (1126)..(1126): n is a, c, g, or t
  misc_feature (1135)..(1135): n is a, c, g, or t
  misc_feature (1140)..(1140): n is a, c, g, or t
  misc_feature (1144)..(1144): n is a, c, g, or t
  misc_feature (1155)..(1155): n is a, c, g, or t
  misc_feature (1158)..(1159): n is a, c, g, or t
  misc_feature (1171)..(1171): n is a, c, g, or t
  misc_feature (1173)..(1173): n is a, c, g, or t
  misc_feature (1178)..(1178): n is a, c, g, or t
  misc_feature (1181)..(1181): n is a, c, g, or t
  misc_feature (1209)..(1209): n is a, c, g, or t
  misc_feature (1217)..(1217): n is a, c, g, or t
  misc_feature (1222)..(1222): n is a, c, g, or t
  misc_feature (1228)..(1229): n is a, c, g, or t
  misc_feature (1239)..(1239): n is a, c, g, or t
  misc_feature (1246)..(1246): n is a, c, g, or t
  misc_feature (1249)..(1249): n is a, c, g, or t
  misc_feature (1260)..(1260): n is a, c, g, or t
  misc_feature (1264)..(1264): n is a, c, g, or t
  misc_feature (1269)..(1269): n is a, c, g, or t
  misc_feature (1272)..(1272): n is a, c, g, or t
  misc_feature (1278)..(1279): n is a, c, g, or t
  misc_feature (1293)..(1293): n is a, c, g, or t
  misc_feature (1303)..(1303): n is a, c, g, or t
  misc_feature (1305)..(1305): n is a, c, g, or t
  misc_feature (1307)..(1307): n is a, c, g, or t
  misc_feature (1310)..(1310): n is a, c, g, or t
  misc_feature (1319)..(1319): n is a, c, g, or t
tagaganaattactatgagaggatcgcatcaccatcaccatcacggatcctatttaggtgacactatagaatcgtcgacccacgcgtccgctgagggtccgctgaagcccggggcacgcatcttctcctttgacggcaaggacgtcctgaggcaccccacctggccccagaagagcgtgtggcatggctcggaccccaacgggcgcaggctgaccgagagctactgtgagacgtggcggacggaggctccctcggccacgggccaggcctcctcgctgctggggggcaggctcctggggcagagtgccgcgagctgccatcacgcctacattgtgctctgcattgagaacagcttcatgactgcctccaagtagccaccgcctggatgcagatggccggagaggaccggcggctcggaggaagcccccaccgtgggcagggagcagccggccagcccctggccccaggacctggctgccatactttcctgtatagttcacgtttcatgtaatcctcaagaaataaaaggaagccaaagagtgtatttttttaaaagtttaaaacagaagcctgatgctgacattcacctgccccaactctcccctgacctgtgagcccagctgggtcaggcagggtgcagtatcatgccctgtgcaacctcttggcctgatcagaccacggctcgatttctccaggatttcctgctttgggaaaccgtgctcgccccagcaggtgctgacttcatctcccacctagcagcaccgttctgtgcacaaaacccagacctgttagcagacaggccccgtgaggcaatgggagctgaggccacactcagcacaaaggncatctggggctcctccagggtgtgtgcttccccctgcggttaaatgggagggnaggctcaggttcccttgggggctaggggggaagccccnttctgcttcaacttctgggnccatttcttccacagcaacccccaggctgaaagcaaggttncccaaagcttcaaanggcgcaantgtgaaccccccannctccnggccttgttnnttccaaaaacaaaananaaanaaccttgggggntgggccttnccaaatgancccatngaaaatnattnnttcaaancaaaaagtntcccncctngcccaaattcnaanntggggaaaattnanggganccntaagtttggggttgggaaaccttcccantcaagggnccccnttttannccctttgttnggaaagnggnttaaaccaccntttntcccnttnaccccnnaaggaaaacggccnctttaaaaangntnagnttggcaaanaa

SEQ ID NO: 63 - DNA, 1178 bp, Homo Sapiens
  misc_feature (693)..(693): n is a, c, g, or t
  misc_feature (841)..(841): n is a, c, g, or t
  misc_feature (853)..(853): n is a, c, g, or t
  misc_feature (875)..(875): n is a, c, g, or t
  misc_feature (889)..(889): n is a, c, g, or t
  misc_feature (896)..(897): n is a, c, g, or t
  misc_feature (903)..(903): n is a, c, g, or t
  misc_feature (907)..(907): n is a, c, g, or t
  misc_feature (936)..(936): n is a, c, g, or t
  misc_feature (949)..(949): n is a, c, g, or t
  misc_feature (961)..(961): n is a, c, g, or t
  misc_feature (980)..(980): n is a, c, g, or t
  misc_feature (984)..(984): n is a, c, g, or t
  misc_feature (987)..(987): n is a, c, g, or t
  misc_feature (991)..(991): n is a, c, g, or t
  misc_feature (993)..(994): n is a, c, g, or t
  misc_feature (1006)..(1006): n is a, c, g, or t
  misc_feature (1010)..(1010): n is a, c, g, or t
  misc_feature (1012)..(1012): n is a, c, g, or t
  misc_feature (1025)..(1025): n is a, c, g, or t
  misc_feature (1037)..(1037): n is a, c, g, or t
  misc_feature (1039)..(1039): n is a, c, g, or t
  misc_feature (1041)..(1041): n is a, c, g, or t
  misc_feature (1043)..(1043): n is a, c, g, or t
  misc_feature (1049)..(1049): n is a, c, g, or t
  misc_feature (1055)..(1056): n is a, c, g, or t
  misc_feature (1065)..(1065): n is a, c, g, or t
  misc_feature (1072)..(1072): n is a, c, g, or t
  misc_feature (1091)..(1091): n is a, c, g, or t
  misc_feature (1097)..(1097): n is a, c, g, or t
  misc_feature (1107)..(1107): n is a, c, g, or t
  misc_feature (1121)..(1121): n is a, c, g, or t
  misc_feature (1131)..(1131): n is a, c, g, or t
  misc_feature (1137)..(1137): n is a, c, g, or t
  misc_feature (1139)..(1139): n is a, c, g, or t
  misc_feature (1143)..(1143): n is a, c, g, or t
  misc_feature (1149)..(1149): n is a, c, g, or t
  misc_feature (1157)..(1157): n is a, c, g, or t
  misc_feature (1160)..(1160): n is a, c, g, or t
  misc_feature (1164)..(1164): n is a, c, g, or t
  misc_feature (1176)..(1177): n is a, c, g, or t
attagagaaattactatgagaggatcgcatcaccatcaccatcacggatcctatttaggtgacactatagaatcgtcgacccacgcgtccggatggaataaatctagcacccctgatggtgtgcccacactttgctgccgaaacgaagccagacaacagatttccatcagcaggatgtgggggctcaaggttctgctgctacctgtggtgagctttgctctgtaccctgaggagatactggacacccactgggagctatggaagaagacccacaggaagcaatataacaacaaggtggatgaaatctctcggcgtttaatttgggaaaaaaacctgaagtatatttccatccataaccttgaggcttctcttggtgtccatacatatgaactggctatgaaccacctgggggacatgaccagtgaagaggtggttcagaagatgactggactcaaagtacccctgtctcattcccgcagtaatgacaccctttatatcccagaatgggaaggtagagccccagactctgtcgactatcgaaagaaaggatatgttactcctgtcaaaaatcagggtcagtgtggttcctgttgggcttttagctctgtgggtgccctggagggccaactcaagaagaaaactggcaaactcttaaatctgagtccccagaacctagtggattgtgtgtctganaatgatggctgtggagggggctacatgaccaatgccttccaatatgtgcagaagaaccggggtattgactctgaagatgcctacccatatgtgggacaggaagagagttgtatgtacaacccaaacaggcaaggcaagctaaatgcanagggtacaaaanagatccccgaaggggaaatganaaaagccctgaaanagggcannggcccnaatngggacctgtcctcctgggggccatttgantgcaagccctgancctcctttccantttttacaggcaaaggggngttnttntgantnnaaagctgccaanaacnanaaatctgaacccntgggggtttttngncngngggaantggaanncccaaaggnaaacaancccttggaaaatttaaaancccccnggggaaaaantggggaaaaaaagnaaatttcccntgggtncnaaanaaaaanaaccccgnggnattncccacctggccnnc

SEQ ID NO: 64 - DNA, 1396 bp, Homo Sapiens
  misc_feature (870)..(870): n is a, c, g, or t
  misc_feature (879)..(879): n is a, c, g, or t
  misc_feature (892)..(892): n is a, c, g, or t
  misc_feature (901)..(901): n is a, c, g, or t
  misc_feature (908)..(908): n is a, c, g, or t
  misc_feature (940)..(940): n is a, c, g, or t
  misc_feature (973)..(973): n is a, c, g, or t
  misc_feature (975)..(975): n is a, c, g, or t
  misc_feature (997)..(997): n is a, c, g, or t
  misc_feature (1005)..(1005): n is a, c, g, or t
  misc_feature (1037)..(1037): n is a, c, g, or t
  misc_feature (1046)..(1046): n is a, c, g, or t
  misc_feature (1048)..(1048): n is a, c, g, or t
  misc_feature (1052)..(1052): n is a, c, g, or t
  misc_feature (1070)..(1071): n is a, c, g, or t
  misc_feature (1076)..(1076): n is a, c, g, or t
  misc_feature (1089)..(1089): n is a, c, g, or t
  misc_feature (1099)..(1099): n is a, c, g, or t
  misc_feature (1102)..(1102): n is a, c, g, or t
  misc_feature (1119)..(1119): n is a, c, g, or t
  misc_feature (1122)..(1122): n is a, c, g, or t
  misc_feature (1129)..(1129): n is a, c, g, or t
  misc_feature (1132)..(1133): n is a, c, g, or t
  misc_feature (1149)..(1149): n is a, c, g, or t
  misc_feature (1162)..(1162): n is a, c, g, or t
  misc_feature (1164)..(1164): n is a, c, g, or t
  misc_feature (1188)..(1188): n is a, c, g, or t
  misc_feature (1194)..(1194): n is a, c, g, or t
  misc_feature (1196)..(1196): n is a, c, g, or t
  misc_feature (1201)..(1201): n is a, c, g, or t
  misc_feature (1206)..(1206): n is a, c, g, or t
  misc_feature (1221)..(1221): n is a, c, g, or t
  misc_feature (1229)..(1229): n is a, c, g, or t
  misc_feature (1231)..(1231): n is a, c, g, or t
  misc_feature (1252)..(1252): n is a, c, g, or t
  misc_feature (1262)..(1263): n is a, c, g, or t
  misc_feature (1269)..(1269): n is a, c, g, or t
  misc_feature (1273)..(1273): n is a, c, g, or t
  misc_feature (1279)..(1279): n is a, c, g, or t
  misc_feature (1281)..(1281): n is a, c, g, or t
  misc_feature (1291)..(1291): n is a, c, g, or t
  misc_feature (1297)..(1297): n is a, c, g, or t
  misc_feature (1301)..(1302): n is a, c, g, or t
  misc_feature (1309)..(1309): n is a, c, g, or t
  misc_feature (1317)..(1317): n is a, c, g, or t
  misc_feature (1327)..(1327): n is a, c, g, or t
  misc_feature (1332)..(1332): n is a, c, g, or t
  misc_feature (1340)..(1340): n is a, c, g, or t
  misc_feature (1352)..(1352): n is a, c, g, or t
  misc_feature (1374)..(1374): n is a, c, g, or t
  misc_feature (1378)..(1378): n is a, c, g, or t
  misc_feature (1381)..(1381): n is a, c, g, or t
  misc_feature (1388)..(1388): n is a, c, g, or t
  misc_feature (1395)..(1395): n is a, c, g, or t
aatagagaaattactatgagaggatcgcatcaccatcaccatcacggatcctatttaggtgacactatagaatcgtcgacccacgcgtccgggtgcactcggggaggcgggaagaggaagaagaaaatgtgcaaagtgagtggcggctgtactgcgtgcgtggagaggtgcccgtggaagggaatttgctggaagtggcctgtcactgtagcagcctgaggtccagaacttccatggtggtgcttaacgtcaacaaggccctcatctacctgtggcacggatgcaaagcccaggcccacacgaaggaggtcggaaggaccgctgcgaacaagatcaaggaacaatgtcccctggaagcaggactgcatagtagcagcaaagtcacaatacacgagtgtgatgaaggctccgagccactcggattctgggatgccttaggaaggagagacaggaaagcctacgattgcatgcttcaagatcctggaagttttaacttcgcgccccgcctgttcatcctcagcagctcctctggggattttgcagccacagagtttgtgtaccctgcccgagccccctctgtggtcagttccatgcccttcctgcaggaagatctgtacagcgcgccccagccagcacttttccttgttgacaatcaccacgaggtgtacctctggcaaggctggtggcccatcgagaacaagatcactggttccgcccgcatccgctgggcctccgaccggaagagtgcgatggagactgtgctccagtactgcaaaggaaaaaaatctcaagaaaccagcccccaagtcttaccttatccacgctggtctggagcccctgacattcaccaatatgtttcccagctgggancacagaganggacatcgctganatcacaganatggacncggaagtttccaatcaaatcacccctcgtggnaaaacgtcttaaccaagctctgtaaaaccattnancccgctgggccgacctcctggncaaggccncttcccgggagggggtcgatcctcttgaagcnttgaaaatntnttcnccccgaaaaaaaacttcnngtttncccttaaacattnacgaaggaanaantaaaaccccctggcccnccngaaaacnagnnaaacctgaaaaaaacnaaaggccttgttntnaatggggaacccccaaagaacccnccggtncnttccnaaaancccttggtccagggnaaaggganantatttttgaacgggtttttcnaaaatttttnncccaantttnaaaccnanttttaaaaantttttntccnnatttttntttttaantttcaggaanttttngaatcttntccccttccggngttcaaaataaaaatttctttnggcnttnccccccntaaaaang

SEQ ID NO: 65 - DNA, 1179 bp, Homo Sapiens
  misc_feature (871)..(871): n is a, c, g, or t
  misc_feature (899)..(899): n is a, c, g, or t
  misc_feature (902)..(902): n is a, c, g, or t
  misc_feature (931)..(931): n is a, c, g, or t
  misc_feature (936)..(936): n is a, c, g, or t
  misc_feature (941)..(941): n is a, c, g, or t
  misc_feature (986)..(986): n is a, c, g, or t
  misc_feature (990)..(990): n is a, c, g, or t
  misc_feature (993)..(993): n is a, c, g, or t
  misc_feature (1000)..(1000): n is a, c, g, or t
  misc_feature (1015)..(1016): n is a, c, g, or t
  misc_feature (1026)..(1026): n is a, c, g, or t
  misc_feature (1036)..(1037): n is a, c, g, or t
  misc_feature (1045)..(1045): n is a, c, g, or t
  misc_feature (1049)..(1049): n is a, c, g, or t
  misc_feature (1051)..(1051): n is a, c, g, or t
  misc_feature (1097)..(1097): n is a, c, g, or t
  misc_feature (1102)..(1102): n is a, c, g, or t
  misc_feature (1115)..(1115): n is a, c, g, or t
  misc_feature (1126)..(1126): n is a, c, g, or t
  misc_feature (1128)..(1128): n is a, c, g, or t
  misc_feature (1132)..(1132): n is a, c, g, or t
  misc_feature (1137)..(1137): n is a, c, g, or t
  misc_feature (1148)..(1148): n is a, c, g, or t
  misc_feature (1151)..(1151): n is a, c, g, or t
  misc_feature (1163)..(1163): n is a, c, g, or t
  misc_feature (1167)..(1167): n is a, c, g, or t
  misc_feature (1178)..(1178): n is a, c, g, or t
gagaaattactatgagaggatcgcatcaccatcaccatcacggatcctatttaggtgacactatagaatcgtcgacccacgcgtccggcagattaaagaagatggctgtccatctgaccccacgagcaaacaggtagaaggagcacatgaaatcacactccactgagagtttcaagtgtgaaatatgcaataaacgatatcttcgagagagcgcatggaaacagcacctaaattgttaccaccttgaagaaggtggagtcagtaagaagcaaagaactgggaaaaaaattcatgtatgtcagtactgtgagaaacagtttgaccattttggacattttaaagaacatcttcgaaaacatacaggtgaaaaaccttttgaatgtccaaattgtcatgaacgatttgctagaaatagcactctgaaatgtcacctcactgcatgccaaactggagtaggggcaaaaaaaggaaggaagaagctctacgaatgccaggtctgcaacagtgtgtttaacagctgggaccagttcaaagatcacttggtaatacacactggagataaacccaaccattgtactttatgtgatttgtggtttatgcaaggaaatgaattaaggaggcatctcagtgatgctcacaatatttcagagcgtctagtaacggaagaagttctttcagtagaaacacgtgtgcaaactgaacctgtaacatcaatgactattatagaacaagttgggaaggtgcatgtgctaccattgcttcaggttcaggtggattcagcacaagtgactgtggaacaagtccatccagatctgctccaggacagccaggtgcacgattcacacatgagtgagcttccagagcaggtccnagtgagttatctagaagtgggccgaatncanactgaaaaaaggtactgaagtacatgtanagganctgcntgttgaacgggtcaatccaatgccagtggaagtacaactgaactnctanaancaaattngaccccgtgaccccnnaaatcctganccagagaaannaagtctanccancnatgctgctgaggctgccaggaaaatcccaaaagctgaggatttaanaccanccccctggattcngaaccaaaagncnaaantgggnccaaccccccnccntttaaaggaatncccngaaaaattttna

SEQ ID NO: 66 - DNA, 982 bp, Homo Sapiens
  misc_feature (706)..(706): n is a, c, g, or t
  misc_feature (755)..(755): n is a, c, g, or t
  misc_feature (763)..(763): n is a, c, g, or t
  misc_feature (774)..(774): n is a, c, g, or t
  misc_feature (794)..(794): n is a, c, g, or t
  misc_feature (798)..(798): n is a, c, g, or t
  misc_feature (828)..(828): n is a, c, g, or t
  misc_feature (837)..(837): n is a, c, g, or t
  misc_feature (843)..(843): n is a, c, g, or t
  misc_feature (853)..(853): n is a, c, g, or t
  misc_feature (857)..(857): n is a, c, g, or t
  misc_feature (862)..(862): n is a, c, g, or t
  misc_feature (875)..(875): n is a, c, g, or t
  misc_feature (877)..(877): n is a, c, g, or t
  misc_feature (887)..(887): n is a, c, g, or t
  misc_feature (889)..(889): n is a, c, g, or t
  misc_feature (892)..(892): n is a, c, g, or t
  misc_feature (895)..(895): n is a, c, g, or t
  misc_feature (901)..(901): n is a, c, g, or t
  misc_feature (906)..(906): n is a, c, g, or t
  misc_feature (929)..(929): n is a, c, g, or t
  misc_feature (931)..(931): n is a, c, g, or t
  misc_feature (947)..(947): n is a, c, g, or t
  misc_feature (954)..(954): n is a, c, g, or t
  misc_feature (958)..(958): n is a, c, g, or t
  misc_feature (960)..(960): n is a, c, g, or t
  misc_feature (963)..(964): n is a, c, g, or t
  misc_feature (967)..(968): n is a, c, g, or t
  misc_feature (970)..(970): n is a, c, g, or t
  misc_feature (978)..(978): n is a, c, g, or t
tagagaaattactatgagaggatcgcatcaccatcaccatcacggatcctatttaggtgacactatagaatcgtcgacccacgcgtccgatctgaaactggccaacaacgcggacaagcagcaggtgtcacgcatcaagcaagtgttcgagaagaagaaccagaagtcagcccagaccatcgcccagctgcacaagaagctggagcactaccgccggcgcctgaaggagattgagcagaacgggccctcgcggcagcccaaggacgtgctgcgggacatgcagcaggggctgaaggacgtgggcgccaacgtgcgcgcaggcatcagcggctttgggggcggcgtggtggagggcgtcaagggcagcctctctggcctctcacaggccacccacaccgccgtggtgtccaagccccgggagtttgccagcctcatccgcaacaagtttggcagtgctgacaacatcgcccacctgaaggaccccctggaagatgggccccctgaggaggcagcccgggcactgagcggcagtgccacactcgtctccagccccaagtatggcagcgatgatgagtgctccagcgccagcgccagctcagccggggcaggcagcaactctggggctgggcctggtggggcgctggggagccctaagtccaatgcactgtatggtgctcctggaaacctggatgctctgctggaaganctacgggagatcaaggagggacagtctcacctggaggactccatggaanacctgaanactcactgcanagggactacacctacatganccantgcctgcagaaggaacgctacaggtacaancggctggangaacanctcaacgacntgantgaancttcatcaaaacnanatgacaaacntnaancangaactngccancatggaagaaaaagtggcctacnanttctattaaaagggcncgggaantccnanaannccnngnaatcctgnctga

SEQ ID NO: 67 - DNA, 1004 bp, Homo Sapiens
  misc_feature (4)..(4): n is a, c, g, or t
  misc_feature (813)..(813): n is a, c, g, or t
  misc_feature (850)..(850): n is a, c, g, or t
  misc_feature (871)..(871): n is a, c, g, or t
  misc_feature (881)..(881): n is a, c, g, or t
  misc_feature (891)..(891): n is a, c, g, or t
  misc_feature (896)..(896): n is a, c, g, or t
  misc_feature (902)..(902): n is a, c, g, or t
  misc_feature (909)..(909): n is a, c, g, or t
  misc_feature (919)..(919): n is a, c, g, or t
  misc_feature (923)..(923): n is a, c, g, or t
  misc_feature (927)..(927): n is a, c, g, or t
  misc_feature (937)..(937): n is a, c, g, or t
  misc_feature (959)..(959): n is a, c, g, or t
  misc_feature (963)..(963): n is a, c, g, or t
  misc_feature (969)..(969): n is a, c, g, or t
  misc_feature (971)..(971): n is a, c, g, or t
  misc_feature (975)..(975): n is a, c, g, or t
  misc_feature (978)..(978): n is a, c, g, or t
  misc_feature (983)..(983): n is a, c, g, or t
  misc_feature (987)..(987): n is a, c, g, or t
  misc_feature (989)..(989): n is a, c, g, or t
  misc_feature (994)..(994): n is a, c, g, or t
  misc_feature (1000)..(1000): n is a, c, g, or t
aaantagagagaattactatgagaggatcgcatcaccatcaccatcacggatcctatttaggtgacactatagaatcgtcgacccacgcgtccgcattgccacgtcgacccagctggcccgggcactgtatgacaacaccgctgagtccccccaggagctgtccttccgccgaggggatgtcctacgggtcctgcagagagagggcgctggtggactggacggctggtgcctctgctccctacacggccagcagggcattgtgcccgccaacagggtgaagctcttgcctgctggcccagcacccaagcccagcctctctcctgcgtccccagcccagcctggctcaccatatccagccccagatcacagcaatgaggaccaggaggtgtatgtggtgccgcccccagctcggccctgtccaacctcaggacctccagctggaccttgcccaccctctcctgacctcatctacaaaatccccagagctagtgggacccagctggctgctcccagagatgccttggaggtctacgatgtgccccccaccgccctccgggtgccctccagtggcccctatgactgccctgcctccttttcccaccctctgacccgggttgccccgcagccccctggagaggatgatgctccctatgatgtgcctctgaccccaaagccacctgcagagctggaaccagatctggagtgggaaggaggccgggagccggggccccccatctatgctgccccctccaacctgaaacgagcgtcagccttactcaatttgtatgaagcacccgaggaactgctggcanacggggagggcggggggcactgatgaggggatctacnatgtgcctctgctggggccanaggctccccnttctccaaanccccntggaanccttggnctcccatgancagnaaancctggcccancttctggccaaaaaccccccancccnaaaaangncccnggntcccntaantnaaaancctgtnccgc

SEQ ID NO: 68 - DNA, 1177 bp, Homo Sapiens
  misc_feature (1)..(1): n is a, c, g, or t
  misc_feature (825)..(825): n is a, c, g, or t
  misc_feature (834)..(834): n is a, c, g, or t
  misc_feature (857)..(857): n is a, c, g, or t
  misc_feature (871)..(871): n is a, c, g, or t
  misc_feature (900)..(900): n is a, c, g, or t
  misc_feature (911)..(911): n is a, c, g, or t
  misc_feature (913)..(913): n is a, c, g, or t
  misc_feature (916)..(916): n is a, c, g, or t
  misc_feature (967)..(967): n is a, c, g, or t
  misc_feature (976)..(976): n is a, c, g, or t
  misc_feature (980)..(980): n is a, c, g, or t
  misc_feature (982)..(982): n is a, c, g, or t
  misc_feature (991)..(991): n is a, c, g, or t
  misc_feature (998)..(998): n is a, c, g, or t
  misc_feature (1004)..(1004): n is a, c, g, or t
  misc_feature (1012)..(1012): n is a, c, g, or t
  misc_feature (1035)..(1035): n is a, c, g, or t
  misc_feature (1053)..(1053): n is a, c, g, or t
  misc_feature (1056)..(1056): n is a, c, g, or t
  misc_feature (1059)..(1059): n is a, c, g, or t
  misc_feature (1066)..(1066): n is a, c, g, or t
  misc_feature (1071)..(1071): n is a, c, g, or t
  misc_feature (1076)..(1076): n is a, c, g, or t
  misc_feature (1092)..(1092): n is a, c, g, or t
  misc_feature (1104)..(1104): n is a, c, g, or t
  misc_feature (1111)..(1111): n is a, c, g, or t
  misc_feature (1121)..(1121): n is a, c, g, or t
  misc_feature (1131)..(1131): n is a, c, g, or t
  misc_feature (1134)..(1134): n is a, c, g, or t
  misc_feature (1142)..(1143): n is a, c, g, or t
  misc_feature (1145)..(1146): n is a, c, g, or t
  misc_feature (1158)..(1158): n is a, c, g, or t
  misc_feature (1164)..(1164): n is a, c, g, or t
  misc_feature (1170)..(1170): n is a, c, g, or t
  misc_feature (1172)..(1173): n is a, c, g, or t
  misc_feature (1177)..(1177): n is a, c, g, or t
ntagagaaattactatgagaggatcgcatcaccatcaccatcacggatcctatttaggtgacactatagaatcgtcgacccacgcgtccgcggatgtgatcctctgcatgtccttcaacacggacggcagcctgctcaccaccacgtgcaaggacaagaagctgcgtgtgattgagccccgctctggccgtgttctgcaggaggccaactgcaaaaaccacagagtgaaccgggtggtgttcctggggaacatgaagcggctcctcacgacaggggtctccaggtggaacacaagacagattgccctctgggaccaggaggacctctccatgcccctgatcgaagaggaaattgatgggctctctggcctcctgttccccttctatgatgctgacacccacatgctctacctggctggaaagggtgatggaaacatccggtactacgagatcagcactgagaagccctacctgagttacctcatggagttccgctccccagccccgcagaaaggcctaggggtcatgcccaagcacgggctggatgtgtcagcctgcgaggtgttccgcttctacaagctggtgactctcaagggcctgatcgagcccatctccatgatcgtgccccggaggtcagattcctaccaggaagacatttacccaatgacaccaggcacggagccagcactgaccccggatgaatggctgggaggcatcaaccgagatcccgtgctgatgtctttgaaagaaggctataagaagtcctcaaaaatggtatttaaggctcccatcaaagaaaagaagagtgttgtggtcaacggaatanatttattanaaaatgtcccacccaggacaganaatgagctccttcnatgttcttccggcagcaggatgaaattcnacggttgaaananganctggcccaaaaggacatccgcattcggcagctccactggaatgaaaaactngcgcaacancccnanaactgttanctcccanctgggntgttttcnaaccgatttctccgtcgtttcantcatccctaaattccccntancantgacccnaaaanaaccngaaaggatggggccancttgagaccccncctaccnctcaaaatgnaaccaccttnacntctgactnngnnaaaaaatcccantttggnaacccngnnggan

SEQ ID NO: 69 - DNA, 1185 bp, Homo Sapiens
  misc_feature (3)..(3): n is a, c, g, or t
  misc_feature (851)..(851): n is a, c, g, or t
  misc_feature (873)..(873): n is a, c, g, or t
  misc_feature (961)..(961): n is a, c, g, or t
  misc_feature (964)..(964): n is a, c, g, or t
  misc_feature (968)..(968): n is a, c, g, or t
  misc_feature (980)..(980): n is a, c, g, or t
  misc_feature (988)..(988): n is a, c, g, or t
  misc_feature (1001)..(1001): n is a, c, g, or t
  misc_feature (1027)..(1027): n is a, c, g, or t
  misc_feature (1032)..(1032): n is a, c, g, or t
  misc_feature (1035)..(1035): n is a, c, g, or t
  misc_feature (1039)..(1039): n is a, c, g, or t
  misc_feature (1060)..(1060): n is a, c, g, or t
  misc_feature (1079)..(1079): n is a, c, g, or t
  misc_feature (1082)..(1082): n is a, c, g, or t
  misc_feature (1090)..(1090): n is a, c, g, or t
  misc_feature (1093)..(1093): n is a, c, g, or t
  misc_feature (1102)..(1102): n is a, c, g, or t
  misc_feature (1105)..(1105): n is a, c, g, or t
  misc_feature (1108)..(1108): n is a, c, g, or t
  misc_feature (1113)..(1113): n is a, c, g, or t
  misc_feature (1125)..(1125): n is a, c, g, or t
  misc_feature (1138)..(1139): n is a, c, g, or t
  misc_feature (1141)..(1141): n is a, c, g, or t
  misc_feature (1149)..(1149): n is a, c, g, or t
  misc_feature (1151)..(1151): n is a, c, g, or t
  misc_feature (1154)..(1154): n is a, c, g, or t
  misc_feature (1156)..(1156): n is a, c, g, or t
  misc_feature (1162)..(1162): n is a, c, g, or t
  misc_feature (1166)..(1167): n is a, c, g, or t
  misc_feature (1173)..(1173): n is a, c, g, or t
  misc_feature (1176)..(1176): n is a, c, g, or t
  misc_feature (1179)..(1179): n is a, c, g, or t
  misc_feature (1184)..(1184): n is a, c, g, or t
atngagaaattactatgagaggatcgcatcaccatcaccatcacggatcctatttaggtgacactatagaatcgtcgacccacgcgtccgcaggaattgtctccctggataaacaaggcgaagtccctggctgtgcagaagcagtagctgtgtggtggcacagtcaggaaaactcgggggccctgttgacagtgacaataccctcccctcccttgggctggacccctctctacagctaggagccaatggcagaagacaaaaccaaaccgagtgagttggaccaagggaagtatgatgctgatgacaacgtgaagatcatctgcctgggagacagcgcagtgggcaaatccaaactcatggagagatttctcatggatggctttcagccacagcagctgtccacgtacgccctgaccctgtacaagcacacagccacggtagatggaaggaccatccttgtggacttttgggacacggcaggccaggagcggttccagagcatgcatgcctcctactaccacaaggcccacgcctgcatcatggtgtttgatgtacagaggaaagtcacctataggaacctgagcacctggtatacagagcttcgggagttcaggccagagatcccatgcatcgtggtggccaataaaattgatgcagacataaacgtgacccaaaaaagcttcaattttgccaagaagttctccctgcccctgtatttcgtctcggctgctgatggtaccaatgttgtgaagctcttcaatgatgcaattcgattagctgtgtcttacaaacagaactcccaggacttcatggatgagatttttcaggagctcgagaacttcagcttggancaggaagaggaggacgtgccanaccaggaacagagcaccagcatcgagaccccatcaaaggaggcggcctctcccccagctgaagggctggggcctaggggtgggtgganccntttnaaaatacccttnccttcaanaactctccagctntgaatggaaaaactctctaggccatnccctnttntacntcttggaacccacccatcctnttaacctccccattctagnccntgaaaaanggnatgagttcnccnccnccaantctggaatgggnggaaaaattcccnncnaatttccntnaancnaaattngggnncccttnttnaanccttnc

SEQ ID NO: 70 - DNA, 1179 bp, Homo Sapiens
  misc_feature (127)..(127): n is a, c, g, or t
  misc_feature (943)..(943): n is a, c, g, or t
  misc_feature (1021)..(1021): n is a, c, g, or t
  misc_feature (1028)..(1028): n is a, c, g, or t
  misc_feature (1050)..(1051): n is a, c, g, or t
  misc_feature (1059)..(1059): n is a, c, g, or t
  misc_feature (1069)..(1069): n is a, c, g, or t
  misc_feature (1079)..(1079): n is a, c, g, or t
  misc_feature (1086)..(1086): n is a, c, g, or t
  misc_feature (1102)..(1102): n is a, c, g, or t
  misc_feature (1107)..(1107): n is a, c, g, or t
  misc_feature (1111)..(1111): n is a, c, g, or t
  misc_feature (1123)..(1123): n is a, c, g, or t
  misc_feature (1141)..(1141): n is a, c, g, or t
  misc_feature (1143)..(1143): n is a, c, g, or t
  misc_feature (1146)..(1146): n is a, c, g, or t
  misc_feature (1149)..(1149): n is a, c, g, or t
  misc_feature (1156)..(1156): n is a, c, g, or t
  misc_feature (1171)..(1172): n is a, c, g, or t
  misc_feature (1174)..(1174): n is a, c, g, or t
  misc_feature (1177)..(1177): n is a, c, g, or t
gagaaattactatgagaggatcgcatcaccatcaccatcacggatcctatttaggtgacactatagaatcgtcgacccacgcgtccgggcaaattgtaatgaaattgttttggcttcaacacatgangttcaagaacttgatgttacttctctactggcctgtcagtcatacatatggatcggagaagaatatgacagagaatccaaaagttcagatgatgttgattatcgtggttccactacaactctttatcaacccagtgcaacatcctattcagcaagtcaggtgcatccaccttcatctctgccatggctgggcactggacagactagcactggagctagtgtgcttatgaaaaggaatctacataatgttaagagaatgacttcacacccagtccatcaatactatcttacaggtgctcaggacggcagtgtacgaatgtttgaatggacgcggcctcagcaacttgtctgctttcgtcaagctggcaatgcaagagttactagattatattttaattcacaaggcaacaaggttagtttctgggggctactgctgaattcatctgaaaatagttgtggatatttaggagtaagtgataaaagtgcatcgaaaaatgaattcagtgaccctggatttaaactgagtagacagtttgttggagtctattcatacactctcttttcttccaatagaagcaaaaatctacaaaatttagtatggattaatcatctatttaaagatactaaatatactgtgagagtaaaaaaactgcctgtgttgagtgtgttggtgattcctgtaagcacagtaaagttcttgagagaaacctagtttcttactaaatttcatcagtaagaggttagaggaaaacagtgaaacaggtaagcagttaagaagtaatggaagggccagtcccagtggttcacacctgtaatnacaacactttaggagcccaaggcaggaggatggctgaactccagcatttgaaacaacctgaacaacaagggggacccntccctanaaaatttttttaaaagcccagnnaggggccnctagtcctanctacccaaanggtgagnctggaggatcccttgnacccngganttgggggtaaanaagttaaatggccccacngnccnccncccgggnaaaaaaaggaaaccnntnctnaa

SEQ ID NO: 71 - DNA, 1171 bp, Homo Sapiens
  misc_feature (780)..(780): n is a, c, g, or t
  misc_feature (926)..(926): n is a, c, g, or t
  misc_feature (930)..(930): n is a, c, g, or t
  misc_feature (936)..(936): n is a, c, g, or t
  misc_feature (939)..(939): n is a, c, g, or t
  misc_feature (944)..(944): n is a, c, g, or t
  misc_feature (961)..(961): n is a, c, g, or t
  misc_feature (978)..(979): n is a, c, g, or t
  misc_feature (991)..(991): n is a, c, g, or t
  misc_feature (1000)..(1000): n is a, c, g, or t
  misc_feature (1012)..(1012): n is a, c, g, or t
  misc_feature (1024)..(1024): n is a, c, g, or t
  misc_feature (1028)..(1028): n is a, c, g, or t
  misc_feature (1048)..(1048): n is a, c, g, or t
  misc_feature (1052)..(1052): n is a, c, g, or t
  misc_feature (1056)..(1056): n is a, c, g, or t
  misc_feature (1064)..(1064): n is a, c, g, or t
  misc_feature (1082)..(1082): n is a, c, g, or t
  misc_feature (1084)..(1084): n is a, c, g, or t
  misc_feature (1087)..(1087): n is a, c, g, or t
  misc_feature (1094)..(1095): n is a, c, g, or t
  misc_feature (1098)..(1098): n is a, c, g, or t
  misc_feature (1100)..(1100): n is a, c, g, or t
  misc_feature (1107)..(1107): n is a, c, g, or t
  misc_feature (1113)..(1113): n is a, c, g, or t
  misc_feature (1126)..(1126): n is a, c, g, or t
  misc_feature (1134)..(1134): n is a, c, g, or t
  misc_feature (1139)..(1140): n is a, c, g, or t
  misc_feature (1151)..(1151): n is a, c, g, or t
  misc_feature (1158)..(1159): n is a, c, g, or t
  misc_feature (1161)..(1161): n is a, c, g, or t
  misc_feature (1165)..(1165): n is a, c, g, or t
  misc_feature (1167)..(1168): n is a, c, g, or t
  misc_feature (1171)..(1171): n is a, c, g, or t
agaaattactatgagaggatcgcatcaccatcaccatcacggatcctatttaggtgacactatagaatcgtcgacccacgcgtccggctgcaagctacaccgtggagccagacccccgatccaggcacctggccctcagcgggcccacctttggtatcattgtgaagcacttccccaagctgctgcccaaggtcctggtccagggcactgtctttgcccgcatggcccctgagcagaagacagagctggtgtgcgagctacagaagcttcagtactgcgtgggcatgtgcggagacggcgccaatgactgtggggccctgaaggcggctgatgtcggcatctcgctgtcccaggcagaagcctcagtggtctcacccttcacctcgagcatggccagtattgagtgcgtgcccatggtcatcagggaggggcgctgttcccttgacacttcattcagcgtcttcaagtacatggctctgtacagcctgacccagttcatctccgtcctgatcctctacacgatcaacaccaacctgggtgacctgcagttcctggccatcgacctggtcatcaccaccacagtggcagtgctcatgagccgcacggggccagcgctggtcctgggacgggtgcggccaccgggggcgctgctcagcgtgcccgtgctcagcagcctgctgctgcagatggtcctggtgaccggcgtgcagctagggggctacttcctgaccctggcccagccatggttcgtgcctctgaacaggacagtggccgcaccanacaacctgcccaactacgagaacaccgtggtcttctctctgtccagcttccagtacctcatcctggctgcagccgtgtccaagggggcgcccttccgccggccgctctacaccaatgagcgtgctaaacaagtgcctcccgcctgnctgngccgcntcnggccnaacgggcctccaaaaancgcttcagcactggaannaaactggccaanaacctggcnccgctgcccccnggcccctgaggnatgnaggcccagggcacccaaaantggnaatncctgcctntgaacaacaattgaaccntntcnaaaaaanncgncncactccnaatccngaggtgggaaggntaaattcntcccnnaaaaccccccnggggaanntnaaantnnccn

SEQ ID NO: 72 - DNA, 989 bp, Homo Sapiens
tgagaggatcgcatcaccatcaccatcacggatcctatttaggtgacactatagaatcgtcgacccacgcgtccgctcgtccgcagcctttttcctccctccttcggccccggggctcacatcctcgctgcctcacaccttgggcgtgtgtgggagcaggagagggattctctggggtccccatttggaacctggagacccacttctgccaacaagtccttcagcctctctgggccttagtttccccccagtgaagtggggatagtgacagctcccccgggagccagtgaaaactttgtgaagggagtgattactgcgggcgaaggcgcttggcacagccacaactgaagctcagccgtcggatgtgattattgttgctattgttaccgctccgcctggactgggtgcccggtcggaaagtcccgctccccgctcctcctcccaggcgcggaagcttcgcgccgcccgcctcgggggacacctcccgcgccatctcgggggcactggagataaggaaaggaacctcctccctggctgggatggctgcccgggcgcgggaggagggccggggacccggtgagggaggaccgtagggcccgtgggggcttcacgcctggcaggcggccggccaggcctccctccctgacatggagagtaacctgtctggcctggtgcctgctgccgggctggtgcctgcgctgccacctgctgtgaccctggggctgacagctgcctacaccaccctgtatgccctgctcttcttctccgtctatgcccagctctggctggtgcttctgtatgggcacaagcgtctcagctatcagacggtgttcctggccctctgtctgctctgggccgccttgcgtaccaccctcttctccttctacttccgagatactccccgcgccaaccgcctggggcccttgcccttctggcttctctactgctgccccgtctgcctgcagttcttcaccttgacgcttatgaac

SEQ ID NO: 73 - DNA, 908 bp, Homo Sapiens
  misc_feature (1)..(1): n is a, c, g, or t
  misc_feature (813)..(813): n is a, c, g, or t
  misc_feature (824)..(824): n is a, c, g, or t
  misc_feature (829)..(829): n is a, c, g, or t
  misc_feature (862)..(862): n is a, c, g, or t
  misc_feature (874)..(874): n is a, c, g, or t
  misc_feature (878)..(878): n is a, c, g, or t
  misc_feature (886)..(886): n is a, c, g, or t
  misc_feature (888)..(889): n is a, c, g, or t
  misc_feature (892)..(895): n is a, c, g, or t
  misc_feature (897)..(902): n is a, c, g, or t
  misc_feature (904)..(908): n is a, c, g, or t
naattagagagaattactatgagaggatcgcatcaccatcaccatcacggatcctatttaggtgacactatagaatcgtcgacccacgcgtccgcggaggcggcgggtgggcccgaggcgcaagaggaagatgaggacgaagaagaggcgctgccgcactccgaggccatggacgtgttccaggagggtctggctatggtggtgcaggacccgctgctctgcgatctgccgatccaggttactctggaagaagtcaactcccaaatagccctagaatacggccaggcaatgacggtccgagtgtgcaagatggatggagaagtaatgcccgtggttgtagtgcagagtgccacagtcctggacctgaagaaggccatccagagatacgtgcagctcaagcaggagcgtgaagggggcattcagcacatcagctggtcctacgtgtggaggacgtaccatctgacctctgcaggagagaaactcacggaagacagaaagaagctccgagactacggcatccggaatcgagacgaggtttccttcatcaaaaagctgaggcaaaagtgagcctccagacaggacaaccctcttcatcactggtggctgagctttttcccagcaggaatgggtcctcgaatcatcgtgcctctttcacagaaaggacgttgtggtggcctcaccccaggcatgcccaacaggaactgtcagcataaacctgggggccctcaggactaggacagggtgagccagtgctccctcctttcatgtacttggcctgagactgacctctcccctaggtccaaatgcccctantcacatggcanacccncggcctggcccactgtataaaaataaaacctgntttgcttcttantttngaaaaaanannaannnnannnnnnannnnn

SEQ ID NO: 74 - DNA, 910 bp, Homo Sapiens
tgagaggatcgcatcaccatcaccatcacggatcctatttaggtgacactatagaatcgtcgacccacgcgtccggtgccgcccactcgcaccgggcgggggctggccagggccgggggcgccgcggaggcggaggcggggctgggccgggcagctccgagtggcggcgcgcgggccagggccggggccggggccggggccggagccggagccggggccgggcggcgcgcctgtggagcgctgggggcggcctggggctgagcatggagcagcgcggcggaggtcgcctgcgaggccgctggccaggcctgagcctctgccaccatggccattgtgcagactctgccagtgccactggagcctgctcctgaagctgccactgccccacaagctccagtcatgggtagtgtgagcagccttatctcaggccggccctgtcccggggggccagctcctccccgccaccacggccctcctgggcccaccttcttccgccagcaggatggcctgctacggggtggctatgaggcacaggagccgctgtgcccagctgtgccccctaggaaggctgtccctgtcaccagcttcacctacatcaatgaggacttccggacagagtcaccccccagcccaagcagtgatgttgaggatgcccgagagcagcgggcacacaatgcccacctccgcggcccaccaccaaagctcatccctgtctctggaaagctggagaagaacatggagaagatcctgatccgcccaacagccttcaagccagtgctgcccaaacctcgaggggctccgtccctgcctagcttcatgggtcctcgggccaccgggctgtctgggagccagggcagcctgacgcagctgttgggggccctgcctcctcctcctcctcttcctcctcctc

SEQ ID NO: 75 - DNA, 902 bp, Homo Sapiens
cgcatcaccatcaccatcacggatcctatttaggtgacactatagaatcgtcgacccacgcgtccggaggcttctcccgaaaaagccacacattcctgcccaagatcttcttccgcaagatgtcatcctcaggggccaaggacaagcctgagctgcagtttcccttccttcaggatgaggacacagtggccacgctgctagagtgcaagacgctcttcatcttgcgcggcctgccaggaagcggcaagtccacgctggcacgggtcatcgtggacaagtaccgtgatggcaccaagatggtgtcggctgacgcttacaagatcacccccggcgctcgaggagccttctccgaggagtacaagcggctcgatgaggacctggctgcctactgccgccgccgggacatcagaattcttgtgcttgatgacaccaaccacgaacgggaacggctggagcagctctttgaaatggccgaccagtaccagtaccaggtggtgctggtggagcccaagacggcgtggcggctggactgtgcccagctcaaggagaagaaccagtggcagctgtcggctgatgacctgaagaagctgaagcctgggctggagaaggacttcctgccgctctacttcggctggttcctgaccaagaagagctctgagaccctccgcaaagccggccaggtcttcctggaagagctggggaaccacaaggccttcaagaaggagctgcgacaattcgtccctggggatgagcccagggagaagatggacttggtcacctactttggaaagagacccccaggcgtgctgcattgcacaaccaagttttgtgactacgggaaggctcccggggcagaggagtacgctcaacaagatgtgttaaagaaatcttactccaaggcc

SEQ ID NO: 76 - DNA, 1008 bp, Homo Sapiens
  misc_feature (65)..(65): n is a, c, g, or t
  misc_feature (874)..(874): n is a, c, g, or t
  misc_feature (886)..(886): n is a, c, g, or t
  misc_feature (905)..(905): n is a, c, g, or t
  misc_feature (921)..(921): n is a, c, g, or t
  misc_feature (926)..(926): n is a, c, g, or t
  misc_feature (933)..(933): n is a, c, g, or t
  misc_feature (950)..(950): n is a, c, g, or t
  misc_feature (1008)..(1008): n is a, c, g, or t
gagaaattactatgagaggatcgcatcaccatcaccatcacggatcctatttaggtgacactatngaatcgtcgacccacgcgtccgctgaggctttagtcaacaatcccaaaattgaagtaatagatgggaagtatgctttcaagcccaagtacaacgtgagagataagaaggccctacttaggctcttagatcagcatgaccagcgaggattaggaggaattcttttagaagacatagaagaagcactgcccaattcccagaaagctgtcaaggctttgggggaccagatactatttgtaaatcgtcccgataagaagaaaatacttttcttcaatgataagagctgtcagttttctgtggatgaagaatttcagaaactgtggaggagtgtcactgtagattccatggacgaggagaaaattgaagaatatctgaagcgacagggtatttcttccatgcaggaatctggaccaaagaaagtggcccctattcagagaaggaaaaagcctgcttcacagaaaaagcgacgctttaagactcataacgaacacttggctggagtgctgaaggattactctgacattacttccagcaaatagggaacagttttgccctggaacagagttacagatacacaatcaagagtgttcttgctgatgctcggggtctgaagactgtcttcctatctgcttcttgcggctgaggagaggagcagttcagtttacaaaacaagtgcaaattaccaaactcaaagcttatttgagtagaatgggctcatgggcaatgtgatgttccctgttaaccttctgttactccctgggagaaaggcgctgagcgtggcatgcaggtgtctttgctgtgtttttctccncttctaaatggntcctggttcctttcttccncgtttggttactttanagcangttttgncccatagtcttgaatgncaatattttgtttattccaaaagaacatattttttaataaaatccctggtaaaaaggn

SEQ ID NO: 77 - DNA, 738 bp, Homo Sapiens
  misc_feature (709)..(709): n is a, c, g, or t
  misc_feature (712)..(713): n is a, c, g, or t
  misc_feature (718)..(737): n is a, c, g, or t
agaaattactatgagaggatcgcatcaccatcaccatcacggatcctatttaggtgacactatagaatcgtcgacccacgcgtccggtgccgccaagggtgtggccgcctacatgaagtcggaggacccgctgttcgtgctggagcacagcctgcccattgacacgcagtactacctggagcagcagctggccaagcccctcctgcgcatcttcgagcccatcctgggcgagggccgtgccgaggctgtgctactgcggggggaccacacgcgctgcaagacggtgctcacgggcaaggtgggcggcctcctggccttcgccaaacgccgcaactgctgcattggctgccgcacagtgctcagccaccagggagccgtgtgtgagttctgccagccccgggagtctgagctgtatcagaaggaggtatcccatctgaatgccctggaggagcgcttctcgcgcctctggacgcagtgccagcgctgccagggcagcctgcacgaggacgtcatctgcaccagccgggactgccccatcttctacatgcgcaagaaggtgcggaaggacctggaagaccaggagcagctcctgcggcgcttcggaccccctggacctgaggcctggtgaccttgcaagcatcccatggggcgggggcgggaccagggagaattaataaagttctggacttttgctaaaaaaaaaaaaaanaannaaaannnnnnnnnnnnnnnnnnnna

SEQ ID NO: 78 - DNA, 888 bp, Homo Sapiens
taactatgagaggatcgcatcaccatcaccatcacggatcctatttaggtgacactatagaatcgtcgacccacgcgtccgcgctcaccaacaccgacctcaaggtggccagcgacacacagttctaccctggcctcgggctggccctggccttccacgacggcagcgtccacatcgtgcaccggctctcactgcagaccatggccgtcttctacagctctgcggccccgaggcctgtggatgagccggccatgaagcgcccccgcaccgcgggccccgccgtccacttaaaggctatgcagctatcgtggacgtcactggccctggtggggattgacagccacgggaagctgagcgtgctccgcctctcaccttccatgggccacccgctggaggtggggctggcgctgcggcacctgctcttcctgctggagtactgcatggtgaccggctacgactggtgggacatcctgctgcacgtgcagcccagtatggtacagagcctggtggagaagctgcacgaggagtacacgcgccagaccgctgccctgcagcaggtcctctccacccggatcctggccatgaaggcctcgctctgcaagctgtcgccctgcacggtgacccgcgtgtgcgactaccacaccaagctcttcctcatcgccatcagctccaccctgaagtcgctgctgcgcccccactttctcaacacgcctgacaagagccccggcgaccggctgaccgagatctgcaccaagatcaccgacgtcgacattgacaaggtcatgatcaacctcaagacggaggaatttgtgctggacatgaacacactgcagcgctgcagcagctcttgcagtgggtggcgacttcgtgctgtacctgctgggccag

SEQ ID NO: 79 - DNA, 1179 bp, Homo Sapiens
  misc_feature (1)..(1): n is a, c, g, or t
  misc_feature (3)..(3): n is a, c, g, or t
  misc_feature (835)..(835): n is a, c, g, or t
  misc_feature (864)..(864): n is a, c, g, or t
  misc_feature (894)..(894): n is a, c, g, or t
  misc_feature (913)..(913): n is a, c, g, or t
  misc_feature (923)..(923): n is a, c, g, or t
  misc_feature (950)..(950): n is a, c, g, or t
  misc_feature (997)..(997): n is a, c, g, or t
  misc_feature (1012)..(1012): n is a, c, g, or t
  misc_feature (1024)..(1024): n is a, c, g, or t
  misc_feature (1045)..(1046): n is a, c, g, or t
  misc_feature (1056)..(1056): n is a, c, g, or t
  misc_feature (1059)..(1060): n is a, c, g, or t
  misc_feature (1063)..(1063): n is a, c, g, or t
  misc_feature (1066)..(1066): n is a, c, g, or t
  misc_feature (1074)..(1074): n is a, c, g, or t
  misc_feature (1087)..(1087): n is a, c, g, or t
  misc_feature (1090)..(1090): n is a, c, g, or t
  misc_feature (1098)..(1098): n is a, c, g, or t
  misc_feature (1111)..(1111): n is a, c, g, or t
  misc_feature (1114)..(1114): n is a, c, g, or t
  misc_feature (1138)..(1138): n is a, c, g, or t
  misc_feature (1140)..(1140): n is a, c, g, or t
  misc_feature (1150)..(1150): n is a, c, g, or t
  misc_feature (1156)..(1156): n is a, c, g, or t
  misc_feature (1165)..(1165): n is a, c, g, or t
  misc_feature (1169)..(1169): n is a, c, g, or t
  misc_feature (1173)..(1173): n is a, c, g, or t
nanttagagaaattactatgagaggatcgcatcaccatcaccatcacggatcctatttaggtgacactatagaatcgtcgacccacgcgtccgagaagcactaccacaggaagagcaagaaggaagtggaagtgaggagagaggagaggagaaggggaccagctctccggactatcggcactaccttcgaatgtgggccaaggagaaagaggctcagaaggagacgattaaggatcttcccaagatgaaccaggagcagttcattgagctgtgcaagacgctttacaacatgttcagtgaagaccccatggagcaggacctgtaccacgccatcgccaccgtggccagcctcctgctccgcatcggagaggtggggaagaagttctcagcccgcacaggcaggaagcccagggactgtgccactgaggaggacgagccaccagcacccgaactgcatcaggacgcagccagggagcttcagcccccagctgcaggagacccccaagccaaagcaggcggagacacacacctcggaaaagccccacaggagagccaggtggtggtggaggggggcagcggcgagggacagggctcaccctcccagctgctgtctgacgatgaaaccaaagacgacatgtccatgtcctcctactcggtggtcagcacgggctccctgcaatgtgaagaccttgcagacgacacggtgctggtgggcggggaggcctgcagccccacagcgcgcatcggcggcaccgtcgacaccgactggtgcatctcctttgagcagatcctggcctccatcctgacggagtccgtgctggtgaacttctttganaaaagagtggacattggactcaagatcanggaccaaaagaaagtggagagacagttcancaccgccagtgaccatgancagcctggantttccggctgatgcctgcacctgtgangcctggcccaaggtgtcatcatggggctggcctcatctcctcctgcnttcctcccttatcanttttcttttaangggtgcccctcctgctctccnngaacattganttnngantgnaaaaaagntggtgcaaacccnctnccttaaanaaattcctgggcntgnttttctggggccggtttttttggncnaaaaaaaagnttgggntcccccttntttnaccngggggg

SEQ ID NO: 80 - DNA, 1226 bp, Homo Sapiens
  misc_feature (1)..(1): n is a, c, g, or t
  misc_feature (894)..(894): n is a, c, g, or t
  misc_feature (919)..(919): n is a, c, g, or t
  misc_feature (1013)..(1013): n is a, c, g, or t
  misc_feature (1024)..(1024): n is a, c, g, or t
  misc_feature (1046)..(1046): n is a, c, g, or t
  misc_feature (1053)..(1053): n is a, c, g, or t
  misc_feature (1061)..(1061): n is a, c, g, or t
  misc_feature (1067)..(1067): n is a, c, g, or t
  misc_feature (1089)..(1089): n is a, c, g, or t
  misc_feature (1107)..(1107): n is a, c, g, or t
  misc_feature (1126)..(1126): n is a, c, g, or t
  misc_feature (1140)..(1140): n is a, c, g, or t
  misc_feature (1154)..(1154): n is a, c, g, or t
  misc_feature (1157)..(1157): n is a, c, g, or t
  misc_feature (1164)..(1165): n is a, c, g, or t
  misc_feature (1167)..(1168): n is a, c, g, or t
  misc_feature (1175)..(1175): n is a, c, g, or t
  misc_feature (1186)..(1186): n is a, c, g, or t
  misc_feature (1193)..(1194): n is a, c, g, or t
  misc_feature (1196)..(1196): n is a, c, g, or t
  misc_feature (1212)..(1212): n is a, c, g, or t
  misc_feature (1217)..(1218): n is a, c, g, or t
  misc_feature (1220)..(1220): n is a, c, g, or t
  misc_feature (1224)..(1224): n is a, c, g, or t
naatagagaaattactatgagaggatcgcatcaccatcaccatcacggatcctatttaggtgacactatagaatcgtcgacccacgcgtccgccgccttctatccagccggcaccctatgctctacagcttccagacatctctgcccaagcttcctgtgcccagggtgtcagccacaattcagcggtacctagagtctgtgcgccccttgttggatgatgaggaatattaccgcatggagttgctggccaaagaattccaggacaagactgcccccaggctgcagaaatacctggtgctcaagtcatggtgggcaagtaactatgtgagtgactggtgggaagagtacatctaccttcgaggcaggagccctctcatggtgaacagcaactattatgtcatggaccttgtgctcatcaagaatacagacgtgcaggcagcccgcctgggaaacatcatccacgccatgatcatgtatcgccgtaaactggaccgtgaagaaatcaagcctgtgatggcactgggcatagtgcctatgtgctcctaccagatggagaggatgttcaacaccactcggatcccgggcaaggacacagatgtgctacagcacctctcagacagccggcacgtggctgtctaccacaagggacgcttcttcaagctgtggctctatgagggcgcccgtctgctcaagcctcaggatctggagatgcagttccagaggatcctggacgacccctccccacctcagcctggggaggagaagctggcagccctcactgcaggaggaagggtggagtgggcgcaggcacgccaggccttctttagctctggaaagaataaggctgccttggaggccatcgagcgtgccgctttcttcgtggccctggatgangaatcctactcctatgaccccgaanatgaagccagcctcagcctctatggcaaggccctgctacatggcaactgctacaacaggtggtttgacaaatccttcactctcatttccttcanaatggccagtngggtctcaatgcaaaacatgcntgggcanatgctccnatcatngggcacctctgggaatttgtcnggggcaaaaaagcttccncctgggctacccggaaacnggcactgcctgggnaaaccaaacctggnctncacctcnnanngggtggnggggaaattcnaaaaagnncngggggtctcaaaaatnctacnngnggcnaa

SEQ ID NO: 81 - DNA, 988 bp, Homo Sapiens
  misc_feature (1)..(1): n is a, c, g, or t
  misc_feature (888)..(888): n is a, c, g, or t
  misc_feature (895)..(895): n is a, c, g, or t
  misc_feature (897)..(897): n is a, c, g, or t
  misc_feature (908)..(908): n is a, c, g, or t
  misc_feature (923)..(923): n is a, c, g, or t
  misc_feature (950)..(950): n is a, c, g, or t
  misc_feature (961)..(961): n is a, c, g, or t
  misc_feature (965)..(965): n is a, c, g, or t
  misc_feature (967)..(967): n is a, c, g, or t
  misc_feature (969)..(988): n is a, c, g, or t
naaattagagaaattactatgagaggatcgcatcaccatcaccatcacggatcctatttaggtgacactatagaatcgtcgacccacgcgtccgagaagaaggaaagcggggccggttccttcaggacccgcctcagggggcaccgcggcggcttggggaccacttggagccccgtcctggggagaaaacagctcacgtctatggccctgactgcttaggcgggagctgcgtgcagctcagcttctccggggcatttttttctacacggttattgctctgtcacccaggctggagttcagcagtgcgatcttggctcattgcagccttgaacctcccgggctcaagtgatcctccctcctcaacctcccaagtagctgggactacagctgggtgagctatgaacaggccaactgcaagggcgagcagtttgtgtttgagaagggcgagtacgcccactgggactggtggaccagcagccagaggacagactcagcagcctgaggcccatcaaagtggacagccaagagcacaagatcatcctctatgaaaaccccaacttcaccgggaagaagatggaaatcatagatgacgatgtacccagcttccacgcccatggctaccaggagaaggtgtcatctgtgtgggtgcggagtggcatgtgggttggctactagtaccctggctaccgtgggctgcagtacctgctggagaagggagactacaaggacagcagcgactttggggcccgtcaccctcaggtacagtccgtgcgctgcatccacgacatgcaggggcaccaatgtggtgccttccacccctccaactagtgcccaccccaccatgcctccttcccaggacccaggtctgctgcccaggaaccctccaanctcccananagtgaatgaantgtgacttgcaactngtctgctgtgggtctttgatctccccntggcaactggngtgngngnnnnnnnnnnnnnnnnnnnn

SEQ ID NO: 82 - DNA, 1179 bp, Homo Sapiens
  misc_feature (882)..(882): n is a, c, g, or t
  misc_feature (892)..(892): n is a, c, g, or t
  misc_feature (939)..(939): n is a, c, g, or t
  misc_feature (951)..(951): n is a, c, g, or t
  misc_feature (953)..(953): n is a, c, g, or t
  misc_feature (955)..(955): n is a, c, g, or t
  misc_feature (981)..(981): n is a, c, g, or t
  misc_feature (1003)..(1003): n is a, c, g, or t
  misc_feature (1009)..(1009): n is a, c, g, or t
  misc_feature (1031)..(1031): n is a, c, g, or t
  misc_feature (1037)..(1037): n is a, c, g, or t
  misc_feature (1054)..(1054): n is a, c, g, or t
  misc_feature (1060)..(1060): n is a, c, g, or t
  misc_feature (1063)..(1063): n is a, c, g, or t
  misc_feature (1081)..(1081): n is a, c, g, or t
  misc_feature (1097)..(1097): n is a, c, g, or t
  misc_feature (1104)..(1104): n is a, c, g, or t
  misc_feature (1122)..(1122): n is a, c, g, or t
  misc_feature (1130)..(1130): n is a, c, g, or t
  misc_feature (1133)..(1133): n is a, c, g, or t
  misc_feature (1148)..(1148): n is a, c, g, or t
  misc_feature (1157)..(1157): n is a, c, g, or t
  misc_feature (1159)..(1161): n is a, c, g, or t
  misc_feature (1163)..(1164): n is a, c, g, or t
  misc_feature (1166)..(1167): n is a, c, g, or t
  misc_feature (1170)..(1170): n is a, c, g, or t
  misc_feature (1176)..(1176): n is a, c, g, or t
  misc_feature (1179)..(1179): n is a, c, g, or t
aaattagagaaattactatgagaggatcgcatcaccatcaccatcacggatcctatttaggtgacactatagaatcgtcgacccacgcgtccgccgactcacgccccagccccaattgggcggccggtttccaattggaagggcttctgagcctcagtcttcgggcggcgctgaccattggcgggcaggatggaggcggagccttgggtcgtcgcccgccgccgggggttaaggtgagcgactgcaggcaaacccggcgacagcgcagctcgcgtcgaccctggctcctctgcctgccccctcaggcccccgcctccttcaggatgacgctggacgtggggccggaggatgagctgcccgactgggccgccgccaaagagttttaccagaagtacgaccctaaggacgtcatcggcagaggagtgagctctgtggtccgccgttgtgttcatcgagctactggccacgagtttgcggtgaagattatggaagtgacagctgagcggctgagtcctgagcagctggaggaggtgcgggaagccacacggcgagagacacacatccttcgccaggtcgccggccacccccacatcagtgaggctgtcttccttgctcctgttagcagacgacctcccacctcctgctggccctgcccatagcccacttccgccaacattgcctccacacctctcctcccttcattccactaaagagtggccatccgttgggcgcccactgcctcctctggttctcctttcttcccagtaacagcccgctgctgtcccagggtggccaagccccgttaatgtgcatccactcctttccatctctgtctctctgcctctcttcctctctccctagtcaccctcatcgattcctacnagtcttctancttcatgttcctggtgtttgacctgtgagtatctccctgccactgcncccagcctgaananantgcggccgggtacagtggctcacgcntgtggttccagcgctttgggangccaanacgggcggattatgaggtcagnaaatcnaaaccatcctggccggnatgatnaanccccttctctactaaaanaaaaaaaattggccangcgtggnggtcgggcctgtaatccnactaatcnganggaagaaaatttttnaacccggangnnnanntnnaangaactnaan

SEQ ID NO: 83 - DNA, 1118 bp, Homo Sapiens
  misc_feature (901)..(901): n is a, c, g, or t
  misc_feature (925)..(925): n is a, c, g, or t
  misc_feature (999)..(999): n is a, c, g, or t
  misc_feature (1025)..(1025): n is a, c, g, or t
  misc_feature (1032)..(1032): n is a, c, g, or t
  misc_feature (1037)..(1037): n is a, c, g, or t
  misc_feature (1050)..(1050): n is a, c, g, or t
  misc_feature (1052)..(1052): n is a, c, g, or t
  misc_feature (1055)..(1055): n is a, c, g, or t
  misc_feature (1071)..(1071): n is a, c, g, or t
  misc_feature (1077)..(1077): n is a, c, g, or t
  misc_feature (1088)..(1088): n is a, c, g, or t
  misc_feature (1092)..(1092): n is a, c, g, or t
  misc_feature (1094)..(1094): n is a, c, g, or t
  misc_feature (1097)..(1097): n is a, c, g, or t
  misc_feature (1099)..(1099): n is a, c, g, or t
  misc_feature (1102)..(1102): n is a, c, g, or t
  misc_feature (1108)..(1108): n is a, c, g, or t
  misc_feature (1110)..(1110): n is a, c, g, or t
  misc_feature (1113)..(1114): n is a, c, g, or t
agagaaattactatgagaggatcgcatcaccatcaccatcacggatcctatttaggtgacactatagaatcgtcgacccacgcgtccggcgccgcgtgcgggctggtggctctgtggcagcggcggcggcaggactccggcactatgagcggcttcagcaccgaggagcgcgccgcgcccttctccctggagtaccgagtcttcctcaaaaatgagaaaggacaatatatatctccatttcatgatattccaatttatgcagataaggatgtgtttcacatggtagttgaagtaccacgctggtctaatgcaaaaatggagattgctacaaaggaccctttaaaccctattaaacaagatgtgaaaaaaggaaaacttcgctatgttgcgaatttgttcccgtataaaggatatatctggaactatggtgccatccctcagacttgggaagacccagggcacaatgataaacatactggctgttgtggtgacaatgacccaattgatgtgtgtgaaattggaagcaaggtatgtgcaagaggtgaaataattggcgtgaaagttctaggcatattggctatgattgacgaaggggaaaccgactggaaagtcattgccattaatgtggatgatcctgatgcagccaattataatgatatcaatgatgtcaaacggctgaaacctggctacttagaagctactgtggactggtttagaaggtataaggttcctgatggaaaaccagaaaatgagtttgcgtttaatgcagaatttaaagataaggactttgccattgatattattaaaagcactcatgaccattggaaagcattagtgactaagaaaacgaatggaaaaggaatcagttgcatgaatacaactttgtctgaaagccccttcnagtgtgatcctgatgctgccaganccattgtggatgctttaccaccaccctgtgaatctgcctgcccagtaccaacagacgtggatagtggtccctcnccaaaaaactaatgaaattctctggnaaacaanctganattgctacctcgngntcntctggatgtataaaantaaaantaatacctttncaancnttnanttnttaaancnccnnaact

SEQ ID NO: 84 - DNA, 943 bp, Homo Sapiens
  misc_feature (1)..(1): n is a, c, g, or t
  misc_feature (741)..(741): n is a, c, g, or t
  misc_feature (757)..(757): n is a, c, g, or t
  misc_feature (818)..(818): n is a, c, g, or t
  misc_feature (829)..(829): n is a, c, g, or t
  misc_feature (834)..(834): n is a, c, g, or t
  misc_feature (837)..(837): n is a, c, g, or t
  misc_feature (840)..(840): n is a, c, g, or t
  misc_feature (849)..(849): n is a, c, g, or t
  misc_feature (855)..(855): n is a, c, g, or t
  misc_feature (862)..(862): n is a, c, g, or t
  misc_feature (865)..(866): n is a, c, g, or t
  misc_feature (871)..(871): n is a, c, g, or t
  misc_feature (876)..(876): n is a, c, g, or t
  misc_feature (880)..(880): n is a, c, g, or t
  misc_feature (886)..(886): n is a, c, g, or t
  misc_feature (895)..(895): n is a, c, g, or t
  misc_feature (908)..(908): n is a, c, g, or t
  misc_feature (910)..(910): n is a, c, g, or t
  misc_feature (919)..(919): n is a, c, g, or t
  misc_feature (923)..(923): n is a, c, g, or t
  misc_feature (926)..(926): n is a, c, g, or t
  misc_feature (934)..(934): n is a, c, g, or t
  misc_feature (939)..(940): n is a, c, g, or t
naatagagaaattactatgagaggatcgcatcaccatcaccatcacggatcctatttaggtgacactatagaatcgtcgacccacgcgtccgaggggtgtgtgtgtgtatgtgtgtgggttagggcttttttcgttgcatgtgatggttctgtggacatatgatccccacaaactgtgggagtgattggccaggccttgttttgtttgtttgtttgtttgtgtttttgttcttttgaagaatagagtggtatttagaaaataaattgcattgcaaagctcttatcggctcatatgagagagcaggttcctgcccttgaaaatgccggtaagctatagcatatgttttttaagacttaagcatttcatgctttaaaataccttcacaagtgaacattacacacagaagttcatttggttttcctttgttttatggtgcatatagcaataaagacccccctccaccctgcaacccccatcccccaccgggcctttgtccctgccttggcttttctccccttctcattctcctctcccctttcctcactgaaggctgtgagttgctttcaatgtgacaacactatgatgtcatttggaaggatttgccaggacagactgattctgagtcctgggtgccgtatgtgtatgcggcagtgttgtcaggcgatcttgtttgaagctctatgttgccataattaccatcaagtacacactgttggcaaaaggctaacacctgactttanaaaatgctgatttganaacaaaaggaaaggtcttttttcactgcttaaagtggggtcactttgataccctttgcggncatgtctgtgnctgangantgnaaaatctcnggatgngcactgncanncatgngtccnccangcctcnaaaacaaangggaaaaggccananttaaaaacnacanccnggcccggngcggnnaaa

SEQ ID NO: 85 - DNA, 1222 bp, Homo Sapiens
  misc_feature (904)..(904): n is a, c, g, or t
  misc_feature (929)..(929): n is a, c, g, or t
  misc_feature (953)..(953): n is a, c, g, or t
  misc_feature (966)..(966): n is a, c, g, or t
  misc_feature (972)..(972): n is a, c, g, or t
  misc_feature (978)..(978): n is a, c, g, or t
  misc_feature (1024)..(1024): n is a, c, g, or t
  misc_feature (1035)..(1035): n is a, c, g, or t
  misc_feature (1041)..(1041): n is a, c, g, or t
  misc_feature (1044)..(1044): n is a, c, g, or t
  misc_feature (1053)..(1053): n is a, c, g, or t
  misc_feature (1066)..(1066): n is a, c, g, or t
  misc_feature (1071)..(1071): n is a, c, g, or t
  misc_feature (1090)..(1090): n is a, c, g, or t
  misc_feature (1093)..(1093): n is a, c, g, or t
  misc_feature (1105)..(1105): n is a, c, g, or t
  misc_feature (1107)..(1107): n is a, c, g, or t
  misc_feature (1113)..(1114): n is a, c, g, or t
  misc_feature (1120)..(1120): n is a, c, g, or t
  misc_feature (1134)..(1134): n is a, c, g, or t
  misc_feature (1138)..(1138): n is a, c, g, or t
  misc_feature (1145)..(1145): n is a, c, g, or t
  misc_feature (1158)..(1159): n is a, c, g, or t
  misc_feature (1163)..(1163): n is a, c, g, or t
  misc_feature (1165)..(1165): n is a, c, g, or t
  misc_feature (1168)..(1168): n is a, c, g, or t
  misc_feature (1171)..(1171): n is a, c, g, or t
  misc_feature (1174)..(1174): n is a, c, g, or t
  misc_feature (1188)..(1188): n is a, c, g, or t
  misc_feature (1193)..(1193): n is a, c, g, or t
  misc_feature (1212)..(1213): n is a, c, g, or t
  misc_feature (1216)..(1216): n is a, c, g, or t
  misc_feature (1221)..(1222): n is a, c, g, or t
tagagaaattactatgagaggatcgcatcaccatcaccatcacggatcctatttaggtgacactatagaatcgtcgacccacgcgtccgcggctagaagcgacaccagacggagcctccggagttcctccgcccccacctcgccgggtcctggagccgcagtcctcccagctgccctcctcgtggccatggagtgtccacacctgagctccagcgtctgcattgctccggactcagccaagttccccaacggctccccgtcgtcctggtgctgcagcgccttcaaatgtttatctggtgtgactgtattatgccctcagagagtactgtatgttgcccaggctggcctcgaactctaggctcaagtgattcttctgcctcagcctcccaagtagctgggactacagatgcaatcaccaccacacttggcagtgtgccggtccaacaaaagcccttgggtctgtttgacttgttcaagtgtccactgtggaaggtatgtgaatggccatgcaaaaaaacattatgaagatgcacaagtacctttaaccaaccataagaaatcagaaaagcaagataaagttcagcacacagtatgtatggattgcagtagctacagtacatactgttatcgctgtgatgattttgtggttaatgacaccaagctgggactggtacagaaagtcagagaacacttacagaacttggaaaactcagctttcacagctgacaggcataagaaaagaaaacttttggaaaactcaacactaaacagcaagttattaaaagtaaatggaagcaccactgccatttgtgccacaggccttcggaatttggggaacacatgtttcatgaatgccatccttcagtcactcagtaacattgagcagttttgctgttattcaaanaactgccccccgtggagttaaggantgggaaaacagcaggaaggcgganataccacaccagnagccangggganaaaatgtgtctttggtaaaaaaattaaaaaaaaactctgtgctttntggcaaggcanccaaantgnatttaaccnaaatccttatttnatgtngtttggaaaatatgccaanttnaggggctatcanancagganncccatnaattctgccctacntttngaacacntaacttggaattnngggngnttnaanggntttccccctaaaantttgnagaaaatttattctttttnnaanaaaann

SEQ ID NO: 86 - DNA, 1111 bp, Homo Sapiens
  misc_feature (873)..(873): n is a, c, g, or t
  misc_feature (891)..(891): n is a, c, g, or t
  misc_feature (908)..(908): n is a, c, g, or t
  misc_feature (912)..(912): n is a, c, g, or t
  misc_feature (917)..(917): n is a, c, g, or t
  misc_feature (937)..(937): n is a, c, g, or t
  misc_feature (942)..(942): n is a, c, g, or t
  misc_feature (944)..(944): n is a, c, g, or t
  misc_feature (947)..(947): n is a, c, g, or t
  misc_feature (965)..(965): n is a, c, g, or t
  misc_feature (973)..(973): n is a, c, g, or t
  misc_feature (984)..(984): n is a, c, g, or t
  misc_feature (994)..(994): n is a, c, g, or t
  misc_feature (997)..(997): n is a, c, g, or t
  misc_feature (1005)..(1005): n is a, c, g, or t
  misc_feature (1011)..(1011): n is a, c, g, or t
  misc_feature (1013)..(1013): n is a, c, g, or t
  misc_feature (1022)..(1022): n is a, c, g, or t
  misc_feature (1027)..(1027): n is a, c, g, or t
  misc_feature (1029)..(1029): n is a, c, g, or t
  misc_feature (1046)..(1046): n is a, c, g, or t
  misc_feature (1055)..(1055): n is a, c, g, or t
  misc_feature (1058)..(1058): n is a, c, g, or t
  misc_feature (1063)..(1064): n is a, c, g, or t
  misc_feature (1070)..(1070): n is a, c, g, or t
  misc_feature (1075)..(1075): n is a, c, g, or t
  misc_feature (1077)..(1077): n is a, c, g, or t
  misc_feature (1085)..(1085): n is a, c, g, or t
  misc_feature (1090)..(1091): n is a, c, g, or t
  misc_feature (1103)..(1103): n is a, c, g, or t
  misc_feature (1110)..(1111): n is a, c, g, or t
tgagaaattactatgagaggatcgcatcaccatcaccatcacggatcctatttaggtgacactatagaatcgtcgacccacgcgtccggcgccccctcccccctccggcgcggaccccgcgtgcgccttgctcgcccgcagccccgagaccgcaggcgtcacaatgtagcagggaccccaggcgtcgtgctcagaaaatggaaaaagagccagggccggaaggagggtgcagaagcgagtccgcgtgcggagccaggaggcagcgtcgcgtgggagtgctggcctgaagcctccatgccccggcagagggacggacacgcggacgtctagcggagaagccaaagatgttgaccaggaagatcaagctgtgggacatcaacgcccacatcacctgccgcctgtgcagcgggtacctcatcgacgccaccacggtgaccgagtgtctgcacacctaagctgagagccacaaggaggacagcagtgagcatctgcacagaaacgagctcagagacgcccgtgttcagtggagcacgccgatggggtgggcgccctggctctagacgctctcctaacacacctgtgctttgatgacagtctgcaggagctgcctggtgaagtacctggaggagaacaacacctgccccacctgcaggattgtgatccaccagagccaccccctgcagtacatcggtcatgacagaaccatgcaagatattgtttacaaattggtaccaggcctccaagaagcggaaatgagaaagcagagggagttctatcacaaattgggcatggaggtgccgggagacatcaagggggagacctgctctgcaaaacagcacttaaattcccatcggaatggtgaaaccaaagcanacgacagttcaaacaaanaggccgcggaggaaaanccgnaggangacaacgactaccaccgcancgacnancangtgaacatctgcctggantgtaacancacaaactgcncgggctgaancgnaatggatncgctgntnaccaaggcnacgtntngatttgaaaatttatcnccaaaaaancanctttnntctttnacgantngaaatttntgcannaggaattttggnaagaacnn

SEQ ID NO: 87 - DNA, 1139 bp, Homo Sapiens
  misc_feature (1)..(1): n is a, c, g, or t
  misc_feature (810)..(810): n is a, c, g, or t
  misc_feature (823)..(823): n is a, c, g, or t
  misc_feature (881)..(881): n is a, c, g, or t
  misc_feature (898)..(898): n is a, c, g, or t
  misc_feature (908)..(908): n is a, c, g, or t
  misc_feature (932)..(932): n is a, c, g, or t
  misc_feature (954)..(954): n is a, c, g, or t
  misc_feature (967)..(967): n is a, c, g, or t
  misc_feature (992)..(992): n is a, c, g, or t
  misc_feature (1008)..(1008): n is a, c, g, or t
  misc_feature (1014)..(1015): n is a, c, g, or t
  misc_feature (1020)..(1020): n is a, c, g, or t
  misc_feature (1027)..(1027): n is a, c, g, or t
  misc_feature (1047)..(1047): n is a, c, g, or t
  misc_feature (1056)..(1056): n is a, c, g, or t
  misc_feature (1072)..(1072): n is a, c, g, or t
  misc_feature (1083)..(1083): n is a, c, g, or t
  misc_feature (1094)..(1095): n is a, c, g, or t
  misc_feature (1098)..(1098): n is a, c, g, or t
  misc_feature (1100)..(1100): n is a, c, g, or t
  misc_feature (1106)..(1106): n is a, c, g, or t
  misc_feature (1108)..(1109): n is a, c, g, or t
  misc_feature (1112)..(1112): n is a, c, g, or t
  misc_feature (1114)..(1114): n is a, c, g, or t
  misc_feature (1116)..(1117): n is a, c, g, or t
  misc_feature (1122)..(1122): n is a, c, g, or t
  misc_feature (1128)..(1128): n is a, c, g, or t
  misc_feature (1131)..(1131): n is a, c, g, or t
  misc_feature (1135)..(1135): n is a, c, g, or t
  misc_feature (1138)..(1138): n is a, c, g, or t
natagagagattactatgagaggatcgcatcaccatcaccatcacggatcctatttaggtgacactatagaatcgtcgacccacgcgtccgccgctatgacaccgcctctgcccctacaagacacagatctctcgtcagccccaaagcctgtggctgcagccacgcctgtgtcccagcaggctgaagagggcctcaccttaccccaggactccgctatgacaccgcctctgcccctacaagacacagatctctcgtcagccccaaagcctgtggctgcagccacgcctgtgtcccagcaggctgaagagggcctcaccttaccccaggactccgctatgacagcacctctgcctctgcaagacacaggccccacctcaggtccagagcctctggctgtggccacccctcaaaccttgcaggcagaagcaggctgtgccccagggacagagcctgtggccaccatggctcagcaggaagtaggtgaggccttaggccccaggccagcacctgaggagaagaatgcagccctccctacagtcccggagcctgcagccttggaccaggtccaacaggatgacccacagccagctgcagaagctgggacaccttgggccgcacaggaagatgcggattccactttgggcatggaggccctcagtctccctgagccggcctctggtgctggggaggaaatagcagaagccctttctaggcctggacgggaagcatgtctggaagcgcgagcgcacacaggtgatggggctaagcctgactcaccccaaaaggagaccctggaggttgagaaccancaggaaggaggcntgaagccactggcacaggaacatggacccaggtcagcacttggaggtgcaagggaagntccccgaatgcgcctcntgctgcctgnccctgaggtcagccaaggcccggntcctgaacccagccaggggagnaaaaaggcctgantggaaagtccaccccggaaacccangctttcccttaactgntggccnnaaaangcaggtntggaattcttgcccaaaatntttcaatangggctgtgttcaattntggaaaaaaancttccctgaannccntngccccnannttngnannaaccntccaanaancggnaanc

SEQ ID NO: 88 - DNA, 1260 bp, Homo Sapiens
  misc_feature (1)..(1): n is a, c, g, or t
  misc_feature (797)..(797): n is a, c, g, or t
  misc_feature (917)..(917): n is a, c, g, or t
  misc_feature (919)..(919): n is a, c, g, or t
  misc_feature (924)..(924): n is a, c, g, or t
  misc_feature (926)..(926): n is a, c, g, or t
  misc_feature (947)..(947): n is a, c, g, or t
  misc_feature (955)..(955): n is a, c, g, or t
  misc_feature (961)..(961): n is a, c, g, or t
  misc_feature (970)..(970): n is a, c, g, or t
  misc_feature (987)..(987): n is a, c, g, or t
  misc_feature (993)..(993): n is a, c, g, or t
  misc_feature (998)..(998): n is a, c, g, or t
  misc_feature (1020)..(1020): n is a, c, g, or t
  misc_feature (1025)..(1025): n is a, c, g, or t
  misc_feature (1036)..(1036): n is a, c, g, or t
  misc_feature (1038)..(1038): n is a, c, g, or t
  misc_feature (1040)..(1040): n is a, c, g, or t
  misc_feature (1042)..(1042): n is a, c, g, or t
  misc_feature (1049)..(1049): n is a, c, g, or t
  misc_feature (1064)..(1064): n is a, c, g, or t
  misc_feature (1066)..(1066): n is a, c, g, or t
  misc_feature (1073)..(1073): n is a, c, g, or t
  misc_feature (1075)..(1075): n is a, c, g, or t
  misc_feature (1080)..(1080): n is a, c, g, or t
  misc_feature (1095)..(1095): n is a, c, g, or t
  misc_feature (1097)..(1097): n is a, c, g, or t
  misc_feature (1102)..(1102): n is a, c, g, or t
  misc_feature (1106)..(1106): n is a, c, g, or t
  misc_feature (1111)..(1111): n is a, c, g, or t
  misc_feature (1113)..(1113): n is a, c, g, or t
  misc_feature (1116)..(1116): n is a, c, g, or t
  misc_feature (1125)..(1126): n is a, c, g, or t
  misc_feature (1137)..(1137): n is a, c, g, or t
  misc_feature (1162)..(1162): n is a, c, g, or t
  misc_feature (1175)..(1175): n is a, c, g, or t
  misc_feature (1184)..(1184): n is a, c, g, or t
  misc_feature (1186)..(1186): n is a, c, g, or t
  misc_feature (1206)..(1206): n is a, c, g, or t
  misc_feature (1212)..(1212): n is a, c, g, or t
  misc_feature (1214)..(1214): n is a, c, g, or t
  misc_feature (1230)..(1230): n is a, c, g, or t
  misc_feature (1239)..(1239): n is a, c, g, or t
  misc_feature (1241)..(1241): n is a, c, g, or t
  misc_feature (1243)..(1243): n is a, c, g, or t
  misc_feature (1250)..(1250): n is a, c, g, or t
  misc_feature (1259)..(1260): n is a, c, g, or t
nattagagaaattactatgagaggatcgcatcaccatcaccatcacggatcctatttaggtgacactatagaatcgtcgacccacgcgtccgcagcacacaaggctgcccgtcttgggatcacaatgaaggccaagcttgctcgcctagaggcccaggagcaggccttcctggctcgtctcaaaggccaggaccctggggcccctcaactgcagtcagagagcaagccccaggagcaggccttcctggctcgtctcaaaggccaggaccctggggcccctcaactgcagtcagagagcaagccccccaaaaaaaagaaaaagaaaaggaggcagaaagaggaggaagaagctacagcatctgaaaggaatgatgcagatgagaagcacccagaacatgctgagcagaacatcagaaaaagcaagaagaagaaaaggcgacatcaagaaggaaaggtctcagatgaaagagagggtacaactaaagggaatgagaaggaggacgctgcaggaacaagtgggcttggggaattgaatagcagagagcaaaccaatcagtccctcaggaaagggaagaaaaagaagaggtggcaccatgaagaggagaagatgggggtcttggaggaaggaggaaaaggcaaggaggctgcaggcagtgtcaggacagaggaggtagagagcagggcatatgctgacccatgcagccgaagaaagaagaggcagcaacaggaggaggaggacttgaacctagaagatagaggtgaggaaactgttttaggtggtggaaccagggaagcanagagcagagcatgcagtgatggaagaagcaggaaaagcaagaagaaaagacagcagcatcaagaggaggaggacatcttggatgtaagggatgagaaggatagcggggctagggaagcananagcanancacacactggctcagcagcanaggtaaangaaaangcaccaccntccccaaaaaggaaaanctggantcacnctgtcccgaagcccaaaagaancgaanaaaaaaaactnangntntggtaangtagggctcattttntntttttcngnatttnaaaccctcaaaaacnanggttnatgnagttntncangtttttttnnccccccccctnaatgaggaattcccccccaaaaagnaaactttattctntgggaattncnccttcttaaaaaaaaacaancggtantncccccccccttttttngagggaatncncncaattcnttttttggnn

SEQ ID NO: 89 - DNA, 1179 bp, Homo Sapiens
  misc_feature (885)..(885): n is a, c, g, or t
  misc_feature (921)..(921): n is a, c, g, or t
  misc_feature (957)..(957): n is a, c, g, or t
  misc_feature (987)..(987): n is a, c, g, or t
  misc_feature (1019)..(1019): n is a, c, g, or t
  misc_feature (1028)..(1028): n is a, c, g, or t
  misc_feature (1052)..(1052): n is a, c, g, or t
  misc_feature (1054)..(1054): n is a, c, g, or t
  misc_feature (1056)..(1056): n is a, c, g, or t
  misc_feature (1070)..(1070): n is a, c, g, or t
  misc_feature (1074)..(1074): n is a, c, g, or t
  misc_feature (1078)..(1078): n is a, c, g, or t
  misc_feature (1080)..(1080): n is a, c, g, or t
  misc_feature (1087)..(1087): n is a, c, g, or t
  misc_feature (1090)..(1090): n is a, c, g, or t
  misc_feature (1101)..(1101): n is a, c, g, or t
  misc_feature (1106)..(1106): n is a, c, g, or t
  misc_feature (1108)..(1109): n is a, c, g, or t
  misc_feature (1111)..(1111): n is a, c, g, or t
  misc_feature (1119)..(1119): n is a, c, g, or t
  misc_feature (1124)..(1124): n is a, c, g, or t
  misc_feature (1127)..(1127): n is a, c, g, or t
  misc_feature (1130)..(1130): n is a, c, g, or t
  misc_feature (1132)..(1132): n is a, c, g, or t
  misc_feature (1142)..(1143): n is a, c, g, or t
  misc_feature (1157)..(1157): n is a, c, g, or t
  misc_feature (1168)..(1169): n is a, c, g, or t
  misc_feature (1179)..(1179): n is a, c, g, or t
gaatagagaaattactatgagaggatcgcatcaccatcaccatcacggatcctatttaggtgacactatagaatcgtcgacccacgcgtccgggacgccagaaaatgttccacgtgggataccctgcgtggggttcactgtagtagctgcactaggtgattcttggagcgggcctgagagacaaggacatgtggatcccagtggtcgggcttcctcggcggctgaggctctccgccttggcgggcgctggtcgcttttgcattttagggtctgaagcggcgacgcgaaagcatttgccggcgaggaaccactgtgggctctctgactcctctccgcagctgtggcccgaaccggatttcaggaatccgccaaggaaggcgtctaaggccagcttagactttaagcgttacgtaaccgatcggagattggctgagaccctggcgcaaatctatttgggaaaaccaagtagacctccacacctactgctggagtgcaatccaggtcctggaatcctgactcaggcattacttgaagctggtgccaaagtggttgcgctcgaaagtgacaaaacttttattccacatttggagtccttaggaaaaaatctggatggaaaactacgagtgattcactgtgacttctttaaactagatcctagaagtggtggagtaataaaaccacctgctatgtcttctcgagggctctttaagaatttgggaatagaagcagttccttggacagcagacatccctttaaaagtagttggaatgttcccaagtagaggtgagaaaagggcactttggaaactcgcatatgacttgtattcctgtacttctatatataaatttggacgaatagaagtaaatatgtttattggtgaaaaanaattccagaaactaatggcagatcctggaaatccanacttgtatcatgtattaagtgttatctggcaattancttgggaaaataaaggttctgcacatgganccctgggtcatcatttgaaaaataccccccgnaaagggccnctggaaaaacccaaagcgtagggnantntttaaaccaattanaacnaaancntgtatcnttnttcaaaaggantcccncnncnaaaatttnttttnccnaanancttaaacccnntgaactaaaaaaanttttttccctnntaaaaacccn

SEQ ID NO: 90 - DNA, 1160 bp, Homo Sapiens
  misc_feature (1)..(1): n is a, c, g, or t
  misc_feature (851)..(851): n is a, c, g, or t
  misc_feature (879)..(879): n is a, c, g, or t
  misc_feature (910)..(910): n is a, c, g, or t
  misc_feature (951)..(951): n is a, c, g, or t
  misc_feature (963)..(963): n is a, c, g, or t
  misc_feature (966)..(966): n is a, c, g, or t
  misc_feature (980)..(980): n is a, c, g, or t
  misc_feature (985)..(985): n is a, c, g, or t
  misc_feature (1039)..(1039): n is a, c, g, or t
  misc_feature (1047)..(1047): n is a, c, g, or t
  misc_feature (1053)..(1053): n is a, c, g, or t
  misc_feature (1064)..(1064): n is a, c, g, or t
  misc_feature (1066)..(1066): n is a, c, g, or t
  misc_feature (1077)..(1077): n is a, c, g, or t
  misc_feature (1093)..(1094): n is a, c, g, or t
  misc_feature (1103)..(1103): n is a, c, g, or t
  misc_feature (1110)..(1110): n is a, c, g, or t
  misc_feature (1127)..(1127): n is a, c, g, or t
  misc_feature (1129)..(1129): n is a, c, g, or t
  misc_feature (1131)..(1131): n is a, c, g, or t
  misc_feature (1133)..(1133): n is a, c, g, or t
  misc_feature (1135)..(1135): n is a, c, g, or t
  misc_feature (1137)..(1137): n is a, c, g, or t
  misc_feature (1139)..(1140): n is a, c, g, or t
  misc_feature (1148)..(1148): n is a, c, g, or t
  misc_feature (1152)..(1152): n is a, c, g, or t
  misc_feature (1158)..(1158): n is a, c, g, or t
  misc_feature (1160)..(1160): n is a, c, g, or t
naatagagaaaattactatgagaggatcgcatcaccatcaccatcacggatcctatttaggtgacactatagaatcgtcgacccacgcgtccgagcacggcatcaccaacctgtgcgtcatcggcggggatggcagcctcacaggtgccaacatcttccgcagcgagtggggcagcctgctggaggagctggtggcggaaggtaagatctcagagactacagcccggacctactcgcacctgaacatcgcgggcctagtgggctccatcgataacgacttctgcggcaccgacatgaccatcggcacggactcggccctccaccgcatcatggaggtcatcgatgccatcaccaccactgcccagagccaccagaggaccttcgtgctggaagtgatgggccggcactgcgggtacctggcgctggtatctgcactggcctcaggggccgactggctgttcatccccgaggctccacccgaggacggctgggagaacttcatgtgtgagaggctgggtgagactcggagccgtgggtcccgactgaacatcatcatcatcgctgagggtgccattgaccgcaacgggaagcccatctcgtccagctacgtgaaggacctggtggttcagaggctgggcttcgacacccgtgtaactgtgctgggccacgtgcagcggggagggacgccctctgccttcgaccggatcctgagcagcaagatgggcatggaggcggtgatggcgctgctggaagccacgcctgacacgccggcctgcgtggtcaccctctcggggaaccagtcagtgcggctgcccctcatggagtgcgtgcagatgaccaaggaagtgcanaaagccatggatgacaagaggtttgacnaggccacccagcttccgtggtgggagcttcnagaacaactggaacatttacaagctcctcgcccaccaaaanccccccaagganaantctaacttctcccntggcnatcctgaatgtgggggcccccggcggctggcatgaatgcggccgtgccctcggnggttgcgnaacggnatctcccatgnanacaaattaacntggtgcccaatggctnnaaagcctanccaaggntcaggtgcaaaaaatangntngncncnannttgccccncttntttggncn

SEQ ID NO: 91 - DNA, 1179 bp, Homo Sapiens
  misc_feature (1)..(1): n is a, c, g, or t
  misc_feature (855)..(855): n is a, c, g, or t
  misc_feature (926)..(926): n is a, c, g, or t
  misc_feature (934)..(934): n is a, c, g, or t
  misc_feature (985)..(985): n is a, c, g, or t
  misc_feature (1001)..(1001): n is a, c, g, or t
  misc_feature (1012)..(1012): n is a, c, g, or t
  misc_feature (1025)..(1025): n is a, c, g, or t
  misc_feature (1028)..(1028): n is a, c, g, or t
  misc_feature (1039)..(1039): n is a, c, g, or t
  misc_feature (1047)..(1047): n is a, c, g, or t
  misc_feature (1049)..(1049): n is a, c, g, or t
  misc_feature (1051)..(1051): n is a, c, g, or t
  misc_feature (1069)..(1069): n is a, c, g, or t
  misc_feature (1071)..(1071): n is a, c, g, or t
  misc_feature (1074)..(1074): n is a, c, g, or t
  misc_feature (1089)..(1089): n is a, c, g, or t
  misc_feature (1099)..(1099): n is a, c, g, or t
  misc_feature (1104)..(1104): n is a, c, g, or t
  misc_feature (1114)..(1114): n is a, c, g, or t
  misc_feature (1122)..(1122): n is a, c, g, or t
  misc_feature (1133)..(1134): n is a, c, g, or t
  misc_feature (1139)..(1139): n is a, c, g, or t
  misc_feature (1144)..(1144): n is a, c, g, or t
  misc_feature (1164)..(1164): n is a, c, g, or t
  misc_feature (1178)..(1178): n is a, c, g, or t
naatagagaaattactatgagaggatcgcatcaccatcaccatcacggatcctatttaggtgacactatagaatcgtcgacccacgcgtccgggaagcaagagcttgtaaaccagaaggactgcccatatatgtgtgcatacaaactggtgaccgtcaagttcaagtggtggggcctgcagaacaaagtggagaacttcatccataagcaagagaggcgtctgtttacaaacttccacaggcagctgttctgttggctcgataagtgggttgacctgaccatggacgacattcgaaggatggaagaagagacgaagagacagctggatgaaatgagacaaaaggacccagtgaaaggaatgacagcagatgactaaagccgcctttcccctctgcactttttgcaagacagtggtcaacaggaagacccagcagctccaccctcccaagtgacaggccattttcggacgcagccgttctgtgcccattcttcaggcaactttcgattccttactgtagctaattctagatgcccttcagtattgtgaacaaatagaccgtctggtgtcacagagcccgcgtgtgcaggagcctgctcctccgagatacgtggcgtgtaggttgctgtagttacagcgcctccgtctctctccattgtgttccgatccatttctgtgtgttcccccaacctttatttccaagtgacattttcagtctttcaaatagctgccttttgtgatgtggtgatttaaatgatttaagttcatttgttctcaaccttggggtaaactgaggtattttgcttcctgggaagatcttcgcaattttgagtgctcctgtggggagcggggatganctaaagatacaatgtttccctgccccgcaccgcttccacaaaatagcaatgtggttttgcagctctgactnctgctccnagtaacccatcgttagggcactctagcactatggaggtacccaaggctcanccagtctctatttaanaaaatttaacnaattacgagttanccntgtcccaatcnctgaatcncnanttactactcttaaaaacncnggnggcttcttggccccnccggttgccncctcngaatccctcngcatctanaaatccccccnntcaantcccncttggagggaattgtccagngggcccctaaaatna

SEQ ID NO: 92 - DNA, 993 bp, Homo Sapiens
  misc_feature (791)..(791): n is a, c, g, or t
  misc_feature (820)..(820): n is a, c, g, or t
  misc_feature (834)..(834): n is a, c, g, or t
  misc_feature (853)..(853): n is a, c, g, or t
  misc_feature (874)..(874): n is a, c, g, or t
  misc_feature (917)..(917): n is a, c, g, or t
  misc_feature (923)..(923): n is a, c, g, or t
  misc_feature (932)..(932): n is a, c, g, or t
  misc_feature (942)..(942): n is a, c, g, or t
  misc_feature (957)..(957): n is a, c, g, or t
  misc_feature (976)..(976): n is a, c, g, or t
agagaattactatgagaggatcgcatcaccatcaccatcacggatcctatttaggtgacactatagaatcgtcgacccacgcgtccgagaacatctgcgagctggccgcgcgcctgctcttcagcgccgtcgagtgggcccgcaacatccccttcttcccggatctgcagatcaccgaccaggtgtccctgctacgcctcacctggagcgagctgttcgtgctcaacgcggcccagtgctctatgccgctgcacgtggcgccgttgctggccgccgccggcctgcatgcctcgcccatgtctgccgaccgcgtcgtggccttcatggaccacatccgcatcttccaggagcaggtggagaagctcaaggcgctacacgtcgactcagccgagtacagctgcctcaaagccatcgtgctgttcacgtcagacgcctgtggcctgtcggatgcggcccacatcgagagcctgcaggagaagtcgcagtgcgcactggaggagtacgtgaggagccagtaccccaaccagcccagccgttttggcaaactgctgctgcgactgccctcgctgcgcaccgtgtcctcctccgtcatcgagcagctcttcttcgtccgtttggtaggtaaaacccccatcgaaactctcatccgcgatatgttactgtctgggagcagcttcaactggccttacatgtccatccagtgctcctagaccttgggcgcttcccacctgccccgtccccctagagactcagaggacccacctgggccaaggactccaaagccgcggggnacaccgggaaagtgcagcgggccaggcangctgggtgggaggnaggaaggccgaaacaggancagcccacccagcaaaaatanaatccgagctacaaaagcatgggaaaaaaaaagactcttttangatcanatctgtgancacgtttggncgaggaaaaacaaancaaaccaaaaaaaagaacnttgtgtctgtctgggtg

SEQ ID NO: 93 - DNA, 1057 bp, Homo Sapiens
  misc_feature (14)..(14): n is a, c, g, or t
  misc_feature (901)..(901): n is a, c, g, or t
  misc_feature (999)..(999): n is a, c, g, or t
  misc_feature (1030)..(1030): n is a, c, g, or t
  misc_feature (1036)..(1036): n is a, c, g, or t
  misc_feature (1043)..(1043): n is a, c, g, or t
  misc_feature (1046)..(1047): n is a, c, g, or t
  misc_feature (1055)..(1055): n is a, c, g, or t
tagaggaaaattanctatgagaggatcgcatcaccatcaccatcacggatcctatttaggtgacactatagaatcgtcgacccacgcgtccgtgcagcgacgccccctggtcccacagataccactgctgctcccgccctttcgctcctcggccgcgcaatgggcacccgcgacgacgagtacgactacctctttaaagttgtccttattggagattctggtgttggaaagagtaatctcctgtctcgatttactcgaaatgagtttaatctggaaagcaagagcaccattggagtagagtttgcaacaagaagcatccaggttgatggaaaaacaataaaggcacagatatgggacacagcagggcaagagcgatatcgagctataacatcagcatattatcgtggagctgtaggtgccttattggtttatgacattgctaaacatctcacatatgaaaatgtagagcgatggctgaaagaactgagagatcatgctgatagtaacattgttatcatgcttgtgggcaataagagtgatctacgtcatctcagggcagttcctacagatgaagcaagagcttttgcagaaaagaatggtttgtcattcattgaaacttcggccctagactctacaaatgtagaagctgcttttcagacaattttaacagagatttaccgcattgtttctcagaagcaaatgtcagacagacgcgaaaatgacatgtctccaagcaacaatgtggttcctattcatgttccaccaaccactgaaaacaagccaaaggtgcagtgctgtcagaacatctaaggcatttctcttctcccctagaaggctgtgtatagtccatttcccaggtctgagatttaaatatatttgtaattcttgtgtcacttttggngttttattacttccatacttatgaaatttttccatgtcctaagtccttttgattttagcctttataaaatcatccacttgtcccgaatgactgcagcntttttttcatgctatggcttcctagccttantttaanaaactgnatnnttgggatncc

SEQ ID NO: 94 - DNA, 1007 bp, Homo Sapiens
  misc_feature (792)..(792): n is a, c, g, or t
  misc_feature (899)..(899): n is a, c, g, or t
  misc_feature (913)..(913): n is a, c, g, or t
  misc_feature (915)..(916): n is a, c, g, or t
  misc_feature (921)..(921): n is a, c, g, or t
  misc_feature (947)..(947): n is a, c, g, or t
  misc_feature (956)..(956): n is a, c, g, or t
  misc_feature (973)..(973): n is a, c, g, or t
  misc_feature (979)..(979): n is a, c, g, or t
  misc_feature (982)..(983): n is a, c, g, or t
  misc_feature (988)..(988): n is a, c, g, or t
  misc_feature (990)..(990): n is a, c, g, or t
  misc_feature (995)..(995): n is a, c, g, or t
  misc_feature (999)..(999): n is a, c, g, or t
  misc_feature (1001)..(1005): n is a, c, g, or t
  misc_feature (1007)..(1007): n is a, c, g, or t
tagagagattactatgagaggatcgcatcaccatcaccatcacggatcctatttaggtgacactatagaatcgtcgacccacgcgtccgccctatatgacagcatagctttcatagctctcaagtctactgacaagagaacagtaccgtatatctttcgggtagacacctcagcagcaaatggttcctcagaaggtctcatgtggctgcggttggtccaatcggccagagataaggaagagcagaaccttgaagcctacataaaaaacggacagctgttctaccgctctctccgcaggattgccaaagacgaggagttactagtttggtacgggaaagaactgactgagttactcttgctctgcccctctagatcccacaacaaaatgaatgggtcgtccccttacacatgcctggaatgcagccaacgtttccagtttgagttcccctatgtggcgcatctgcgtttccgctgccccaagagacttcacagcgctgatataagtccccaagacgaacaaggcggcggcgtgggcaccaaggaccacgggggcggcggcggcggtggcaaagaccagcagcagcagcagcaggaggcacctttaggcccgggtcccaagttttgcaaagccggccccctccaccactacccatccccctccccggaaagcagcaacccatccgctgccgccggcggcagcagcgcgaagccatccacagacttccacaacctggccagggagctggaaaactcccggggaggcagcagctgctccccagcccagagcctcancagcggtagcggcagcggcggcggcggcggccaccaggaggcggagctgagtcccgacggcatcgccacgggcggcggcaaaggaaagaggaaattcccggaagagncggcggaaggccgncnntggcnctggtctgtaaggggccggggccccnttctaaaanggcccctcccggcctcnaagganganntgggngngcacnccgnannnnnan

SEQ ID NO: 95 - DNA, 1179 bp, Homo Sapiens
  misc_feature (2)..(2): n is a, c, g, or t
  misc_feature (884)..(884): n is a, c, g, or t
  misc_feature (918)..(918): n is a, c, g, or t
  misc_feature (959)..(959): n is a, c, g, or t
  misc_feature (973)..(973): n is a, c, g, or t
  misc_feature (979)..(979): n is a, c, g, or t
  misc_feature (992)..(992): n is a, c, g, or t
  misc_feature (998)..(998): n is a, c, g, or t
  misc_feature (1002)..(1002): n is a, c, g, or t
  misc_feature (1042)..(1042): n is a, c, g, or t
  misc_feature (1046)..(1046): n is a, c, g, or t
  misc_feature (1048)..(1048): n is a, c, g, or t
  misc_feature (1054)..(1054): n is a, c, g, or t
  misc_feature (1068)..(1068): n is a, c, g, or t
  misc_feature (1072)..(1073): n is a, c, g, or t
  misc_feature (1077)..(1077): n is a, c, g, or t
  misc_feature (1084)..(1084): n is a, c, g, or t
  misc_feature (1109)..(1109): n is a, c, g, or t
  misc_feature (1131)..(1131): n is a, c, g, or t
  misc_feature (1133)..(1133): n is a, c, g, or t
  misc_feature (1138)..(1138): n is a, c, g, or t
  misc_feature (1146)..(1146): n is a, c, g, or t
  misc_feature (1160)..(1160): n is a, c, g, or t
  misc_feature (1162)..(1162): n is a, c, g, or t
anaattagagaaattactatgagaggatcgcatcaccatcaccatcacggatcctatttaggtgacactatagaatcgtcgacccacgcgtccgagcggcagcagggacggttgctgcaggttcggggtcggccggcctgcgcgtgggcttgcgaggacgctgttcgtcccctgcgctggggtgtccgacagcgaggaggagaacgacgcacggagcccgcgcgactggaaccagcaaagctccatctgtcggcagaggagaagggggaggaggcacggccgaggcaaacgagcggacgcctcgtcgccgggtgccggtatcaccccgctgcaacgccttccagcaaaagccaccgcggcccgggttgcagcagccggacggatgccaaggccacacggcagccacgggggcagccgtcgcagtcgccgtcccacacgggctgcggacaccaagggttgctaatgaagtgattgagaagaaacagtgaacatcctcatttcacagataagacaacatggatcagccttttactgtgaattctctgaaaaagttagctgctatgcctgaccatacagatgtttccctaagcccagaagagcgagtccgtgccctaagcaagcttggttgtaatatcaccatcagtgaagacatcactccacgacgttactttaggtctggattagagatggagaggatggcgtctgtgtatttggaagaaggaaatttggaaaatgcctttgttctttataataaatttataaccttatttgtagaaaagcttcctaaccatcgagattaccagcaatgtgcagtacctgaaaaagcaggatattatgaagaaactgaaggaaattgcattcccaaggacagatgaattgaaaancgaccttttaaagaatataacgtaaaataccaanaatatttgcaaaagcaaaaaacaaatataaagctgaaattnctcaaaaattggancatcanaaattgataaagncaaaangaancggattgctcaatgccccagcaacactaaaatcgaaacantttntnttttcnaaaatcacctcaanaaannaaanttacccnaggtcaaattgcaaattcccaaacntcaggggttttcaaaaaaattnangggancccttttntcttgttttttccnancccaaaaaatttttttt

SEQ ID NO: 96 - DNA, 866 bp, Homo Sapiens
  misc_feature (846)..(846): n is a, c, g, or t
  misc_feature (858)..(858): n is a, c, g, or t
tagaggaaattactatgagaggatcgcatcaccatcaccatcacggatcctatttaggtgacactatagaatcgtcgacccacgcgtccggaggattcttcccggggagaccgcagcccatcggcatggctcaagagtttgtgaactgcaaaatccagcctgggaaggtggttgtgttcatcaagcccacctgcccgtactgcaggagggcccaagagatcctcagtcaattgcccatcaaacaagggcttctggaatttgtcgatatcacagccaccaaccacactaacgagattcaagattatttgcaacagctcacgggagcaagaacggtgcctcgagtctttatcggtaaagattgtataggcggatgcagtgatctagtctctttgcaacagagtggggaactgctgacgcggctaaagcagattggagctctgcagtaaccacagatctcataggaaatgttcaacaattctgtgaaaggtcacaggacccaattggagaaatcatatgaaaagcatagttggtcttggtgtcatatggatcagaggcacaagtgcagaggctgtggtcatgcggaacactctgttatttaagatggctatccagataatcctgaacactgtgtatttattttatttagactaccagcaaagattaaagcatgaaatgtaaaacatctgataaaacttacagccccctacaccaagagtgtatctgtgaaagggctcctacactttgaaaacttaagaatcccttatcatgaagtttgcctgttctaaaattgtaagattgttaatttcccttcaatctctagtgacaacacttaatttcttttctaanaaaaaaaaaccntatagatg

SEQ ID NO: 97 - DNA, 1110 bp, Homo Sapiens
  misc_feature (784)..(784): n is a, c, g, or t
  misc_feature (869)..(869): n is a, c, g, or t
  misc_feature (881)..(881): n is a, c, g, or t
  misc_feature (902)..(902): n is a, c, g, or t
  misc_feature (906)..(906): n is a, c, g, or t
  misc_feature (919)..(919): n is a, c, g, or t
  misc_feature (923)..(924): n is a, c, g, or t
  misc_feature (927)..(927): n is a, c, g, or t
  misc_feature (930)..(930): n is a, c, g, or t
  misc_feature (941)..(941): n is a, c, g, or t
  misc_feature (949)..(949): n is a, c, g, or t
  misc_feature (962)..(962): n is a, c, g, or t
  misc_feature (967)..(967): n is a, c, g, or t
  misc_feature (969)..(969): n is a, c, g, or t
  misc_feature (978)..(979): n is a, c, g, or t
  misc_feature (990)..(990): n is a, c, g, or t
  misc_feature (992)..(992): n is a, c, g, or t
  misc_feature (1009)..(1009): n is a, c, g, or t
  misc_feature (1012)..(1012): n is a, c, g, or t
  misc_feature (1023)..(1023): n is a, c, g, or t
  misc_feature (1031)..(1031): n is a, c, g, or t
  misc_feature (1033)..(1033): n is a, c, g, or t
  misc_feature (1036)..(1036): n is a, c, g, or t
  misc_feature (1043)..(1043): n is a, c, g, or t
  misc_feature (1053)..(1053): n is a, c, g, or t
  misc_feature (1055)..(1055): n is a, c, g, or t
  misc_feature (1059)..(1059): n is a, c, g, or t
  misc_feature (1068)..(1069): n is a, c, g, or t
  misc_feature (1081)..(1081): n is a, c, g, or t
  misc_feature (1085)..(1085): n is a, c, g, or t
  misc_feature (1089)..(1090): n is a, c, g, or t
  misc_feature (1098)..(1098): n is a, c, g, or t
  misc_feature (1103)..(1103): n is a, c, g, or t
  misc_feature (1110)..(1110): n is a, c, g, or t
tagagagattactatgagaggatcgcatcaccatcaccatcacggatcctatttaggtgacactatagaatcgtcgacccacgcgtccgataaaagcgcagccgagcccagcgccccgcacttttctgagcagacgtccagagcagagtcagccagcatgaccgagcgccgcgtccccttctcgctcctgcggggccccagctgggaccccttccgcgactggtacccgcatagccgcctcttcgaccaggccttcgggctgccccggctgccggaggagtggtcgcagtggttaggcggcagcagctggccaggctacgtgcgccccctgccccccgccgccatcgagagccccgcagtggccgcgcccgcctacagccgcgcgctcagccggcaactcagcagcggggtctcggagatccggcacactgcggaccgctggcgcgtgtccctggatgtcaaccacttcgccccggacgagctgacggtcaagaccaaggatggcgtggtggagatcaccggcaagcacgaggagcggcaggacgagcatggctacatctcccggtgcttcacgcggaaatacacgctgccccccggtgtggaccccacccaagtttcctcctccctgtcccctgagggcacactgaccgtggaggcccccatgcccaagctagccacgcagtccaacgagatcaccatcccagtcaccttcgagtcgcgggcccagcttgggggcccagaagctgcaaaatccgatgagactgccgccaagtaaagccttaancccggatgcccaccccctgctgccgccactggctgtgcctcccccgccacctgtgtgttctttttgatacattttatctttctgntttttctcaatnaaagttcaaagcaaccccccnttanataaaaaaaatanaaannaanaantaaaaaaaggncggccccnctcccctttaagnggatncnaatttaaannttaatttaacntnaactttggaactcctgnttnaaaaaatccgnaaatggancntcnaaaactncctttttggnantttntttaaaaanntttcggtttccncccngggnntttttttntttgnggaaaan

SEQ ID NO: 98 - DNA, 1094 bp, Homo Sapiens
  misc_feature (746)..(746): n is a, c, g, or t
  misc_feature (750)..(750): n is a, c, g, or t
  misc_feature (870)..(870): n is a, c, g, or t
  misc_feature (876)..(876): n is a, c, g, or t
  misc_feature (910)..(911): n is a, c, g, or t
  misc_feature (913)..(913): n is a, c, g, or t
  misc_feature (922)..(922): n is a, c, g, or t
  misc_feature (925)..(925): n is a, c, g, or t
  misc_feature (932)..(932): n is a, c, g, or t
  misc_feature (941)..(941): n is a, c, g, or t
  misc_feature (949)..(949): n is a, c, g, or t
  misc_feature (966)..(966): n is a, c, g, or t
  misc_feature (971)..(971): n is a, c, g, or t
  misc_feature (995)..(998): n is a, c, g, or t
  misc_feature (1002)..(1002): n is a, c, g, or t
  misc_feature (1005)..(1005): n is a, c, g, or t
  misc_feature (1010)..(1010): n is a, c, g, or t
  misc_feature (1028)..(1028): n is a, c, g, or t
  misc_feature (1062)..(1062): n is a, c, g, or t
  misc_feature (1067)..(1067): n is a, c, g, or t
  misc_feature (1074)..(1074): n is a, c, g, or t
  misc_feature (1076)..(1076): n is a, c, g, or t
  misc_feature (1081)..(1081): n is a, c, g, or t
  misc_feature (1086)..(1087): n is a, c, g, or t
  misc_feature (1094)..(1094): n is a, c, g, or t
atagagaaattactatgagaggatcgcatcaccatcaccatcacggatcctatttaggtgacactatagaatcgtcgacccacgcgtccgcggacgcgtgggtgagtcgaggtgactggtacaagacaaaggagatcctgctgaaggggcccgactggatcctgggcgagatcaagacatcgggtttgaggggccgtggaggcgctggcttccccactggcctcaagtggagcttcatgaataagccctcagatggcaggcccaagtatctggtggtgaacgcagacgagggggagccgggcacctgcaaggaccgggagatcttacgccatgatcctcacaagctgctggaaggctgcctggtggggggccgggccatgggcgcccgcgctgcctatatctacatccgaggggaattctacaatgaggcctccaatctgcaggtggccatccgagaggcctatgaggcaggtctgattggcaagaatgcttgtggctctggctatgattttgacgtgtttgtggtgcgcggggctggggcctacatctgtggagaggagacagcgctcatcgagtccattgagggcaagcagggcaagccccgcctgaagccccccttccccgcagacgtgggtaaggcctggcgtaaccctgggtcagactgtgtcctgtgacacccgggatctggctaggctccctttggattgttcttagggatttctgagtggcttcccggctggggccanatanagagtaggctggcaacaacacacaggctcccccagggccgcctgctgtccctcctcctgcctcggtccccgccgcaccagtgctgctctgtggctccaccttcacagtgcctgttctgangctaanggccatggggtgaacaaggcaatgggcatctctnnantttggggtncancagggantaaaatganaagggganattaaaacaagggcctntgccntgggttgcaggaaccctgggaaannnncttnctngccangaaaattgcccccccccntaacaaccacaaatttctttcccatttcctgaangaatntttggcngnccccnaattnnggccaan

SEQ ID NO: 99 - DNA, 1179 bp, Homo Sapiens
  misc_feature (4)..(4): n is a, c, g, or t
  misc_feature (903)..(903): n is a, c, g, or t
  misc_feature (914)..(914): n is a, c, g, or t
  misc_feature (959)..(959): n is a, c, g, or t
  misc_feature (1011)..(1011): n is a, c, g, or t
  misc_feature (1039)..(1039): n is a, c, g, or t
  misc_feature (1041)..(1041): n is a, c, g, or t
  misc_feature (1046)..(1046): n is a, c, g, or t
  misc_feature (1057)..(1057): n is a, c, g, or t
  misc_feature (1064)..(1064): n is a, c, g, or t
  misc_feature (1076)..(1076): n is a, c, g, or t
  misc_feature (1093)..(1093): n is a, c, g, or t
  misc_feature (1109)..(1109): n is a, c, g, or t
  misc_feature (1128)..(1128): n is a, c, g, or t
  misc_feature (1138)..(1138): n is a, c, g, or t
  misc_feature (1142)..(1142): n is a, c, g, or t
  misc_feature (1153)..(1153): n is a, c, g, or t
  misc_feature (1156)..(1156): n is a, c, g, or t
  misc_feature (1160)..(1160): n is a, c, g, or t
  misc_feature (1167)..(1167): n is a, c, g, or t
  misc_feature (1176)..(1176): n is a, c, g, or t
aaantagagaaattactatgagaggatcgcatcaccatcaccatcacggatcctatttaggtgacactatagaatcgtcgacccacgcgtccgggcgcgggtgcgcgcgcagctgctgtggccctgcttggtgcgcccgctgtcaccgccatggctgccccgtgtttgctgcggcaaggacgagccggggcgctgaagactatgctccaggaagcccaggtgtttcgaggacttgcttctacggtttctttgtctgcggaatcagggaagagtgaaaagggtcagccacagaattccaagaagcaaagtccaccaaaaaatgtagtggaaccaaaggagaggggcaagctcctagccacccagacagcagctgaattgtctaaaaacttatcttcacccagttcttacccgccagctgtgaataagggcaggaaggtagctagtcccagtcccagtggcagcgtgctattcacagatgaaggggttccgaaatttttgtcaagaaagactttggtagagtttccacagaaagttctgtctccattcagaaaacagggctctgattcagaagctcgtcaggtgggtcggaaagtgacgtcgccttcgtcttcatcctcttccagctcctctgattctgaatctgatgatgaggctgacgtttcagaggtcactcctcgagtggtgagcaaaggcagaggggggcttcgaaaaccagaggcctctcattcctttgaaaacagagccccccgagttacagtatcagcaaaagagaaaaccttgctgcagaagccgcatgtggacattactgatccagagaagccccaccagccaaagaagaaagggtcccctgctaagccatcagaaggcagggaaaatgcgagaccaaaaaaccacaatgcccanatctcaagtanatgaagagttttttgaagcaaagtttaaaggaaaaaacaattgcngaaaacattttagatttaaatgaaatagataaagaaagcccaaagccatttngaaattaaaggaacccttacctgtcccncncaaanccagggttgtntgccccnccgaaagggcancccaaccccctgctgtntttggccaaaaaaagnccaaaacaaaaagggccanctgcaaaccnattnctcctgggggnggnaaangggcttntggaaaaanccg

SEQ ID NO: 100 - DNA, 1105 bp, Homo Sapiens
  misc_feature (728)..(728): n is a, c, g, or t
  misc_feature (752)..(752): n is a, c, g, or t
  misc_feature (841)..(841): n is a, c, g, or t
  misc_feature (853)..(853): n is a, c, g, or t
  misc_feature (856)..(856): n is a, c, g, or t
  misc_feature (884)..(884): n is a, c, g, or t
  misc_feature (894)..(894): n is a, c, g, or t
  misc_feature (910)..(910): n is a, c, g, or t
  misc_feature (918)..(918): n is a, c, g, or t
  misc_feature (948)..(948): n is a, c, g, or t
  misc_feature (962)..(962): n is a, c, g, or t
  misc_feature (975)..(975): n is a, c, g, or t
  misc_feature (984)..(984): n is a, c, g, or t
  misc_feature (999)..(999): n is a, c, g, or t
  misc_feature (1002)..(1003): n is a, c, g, or t
  misc_feature (1007)..(1007): n is a, c, g, or t
  misc_feature (1029)..(1029): n is a, c, g, or t
  misc_feature (1056)..(1056): n is a, c, g, or t
  misc_feature (1060)..(1060): n is a, c, g, or t
  misc_feature (1064)..(1064): n is a, c, g, or t
  misc_feature (1066)..(1066): n is a, c, g, or t
  misc_feature (1069)..(1069): n is a, c, g, or t
  misc_feature (1082)..(1082): n is a, c, g, or t
  misc_feature (1084)..(1084): n is a, c, g, or t
  misc_feature (1090)..(1090): n is a, c, g, or t
  misc_feature (1092)..(1094): n is a, c, g, or t
  misc_feature (1101)..(1102): n is a, c, g, or t
aatagagaaattactatgagaggatcgcatcaccatcaccatcacggatcctatttaggtgacactatagaatcgtcgacccacgcgtccgcccccggcggcacggcgctggggaggcgatggcgccggccgcgtccaggctgcgggccgaagccgggctcggggcgctgccgcggcgggcgctcgcccagtacctgctcttcctgcggctctacccggtgctcaccaaggcggccaccagtggcattttgtcagcacttgggaacttcctggcccagatgattgagaagaagcggaaaaaagaaaactctagaagtctggatgtcggtgggcctctgagatatgccgtttacgggttcttcttcacagggccgctgagtcacttcttctacttcttcatggaacattggatccctcctgaggtccccctggcagggctcaggaggcttctcctggaccgcctcgtctttgcaccggccttcctcatgttgttcttcctcatcatgaactttctggaggggaaagacgcctcagccttcgccgccaagatgagggggggcttctggccggcgctgaggatgaactggcgggtgtggacgccactacagttcatcaacatcaactacgtccctctgaagttccgggtgctcttcgccaacctggcagctctgttctggtatgcctacctggcctccttggggaagtgacgaccgctgggagaacatcangtgcactgtggacgtgggtctggnggtctcacccgccccagcgagagcagaaccaatccagtcaagatgtcactgactctaaatcaggtgattcaagatgccccaaaaatganggatagagaaancanaaattctctgaatgtcaaaaaccctgtnttttaaaaangcaattcgctgccttnaggttggngctgccccaaaaaatttaaaaatttagtcnaggcaatttcaatngttactgttgganccgaatttnggatcccaataaacnaannatgncaggttcaaaaaaaaaaaaaanaaaaaaaaagggcggcccctcccaaanaggnatcncnaanaaagtttaattantnagcttngnnncccgttnnaaa

SEQ ID NO: 101 - DNA, 1111 bp, Homo Sapiens
  misc_feature (1)..(1): n is a, c, g, or t
  misc_feature (872)..(872): n is a, c, g, or t
  misc_feature (880)..(880): n is a, c, g, or t
  misc_feature (886)..(886): n is a, c, g, or t
  misc_feature (897)..(897): n is a, c, g, or t
  misc_feature (922)..(922): n is a, c, g, or t
  misc_feature (967)..(967): n is a, c, g, or t
  misc_feature (998)..(998): n is a, c, g, or t
  misc_feature (1000)..(1000): n is a, c, g, or t
  misc_feature (1009)..(1009): n is a, c, g, or t
  misc_feature (1018)..(1018): n is a, c, g, or t
  misc_feature (1028)..(1028): n is a, c, g, or t
  misc_feature (1030)..(1032): n is a, c, g, or t
  misc_feature (1034)..(1034): n is a, c, g, or t
  misc_feature (1038)..(1038): n is a, c, g, or t
  misc_feature (1052)..(1052): n is a, c, g, or t
  misc_feature (1072)..(1072): n is a, c, g, or t
  misc_feature (1074)..(1075): n is a, c, g, or t
  misc_feature (1082)..(1082): n is a, c, g, or t
  misc_feature (1086)..(1086): n is a, c, g, or t
  misc_feature (1093)..(1093): n is a, c, g, or t
  misc_feature (1100)..(1100): n is a, c, g, or t
  misc_feature (1106)..(1106): n is a, c, g, or t
ntagagaaattactatgagaggatcgcatcaccatcaccatcacggatcctatttaggtgacactatagaatcgtcgacccacgcgtccgcccacgcgtccgccttagccgacagcgagaaactgcctattcagaaacacagaaacaccgagacctcaaaatcccctgagaaggacgttcccatggtagaaaagaagagcaagaaacccaagaagaaagagaaaaaacacaaagagaaagagagagacaaggagaagaagaaggagaaggagaagaaggctgaggacctggacttctggctgtctaccaccccaccgcctgcccccgcccccgcccccgcccccgttccatccacggacgagtgtgaggacgccaagacggaggcgcagggcgaggaggacgatgccgaggggcaagaccaggacaagaaatctcccaagcctaagaagaagaagcacaggaaggagaaggaggagcggaccaaaggcaagaagaagtccaagaagcagcctccaggcagcgaggaggcagcgggggagccggtgcagaatggcgcgccagaggaggagcagctcccgcctgagtccagctactccctcctcgctgaaaattcctatgttaaaatgacctgtgacatccggggcagtctgcaggaggacagccaggtcactgtggccatcgtgctggagaacaggagcagcagcatcctcaagggcatggagctcagcgtgctggactcactcaatgccaggatggcccggccgcagggctcctccgtccacgatggcgtccccgtgcctttccagctgcccccaggcgtctccaacgaagcccagtatgtgttcaccatccagagcatcgtcatggcgcanaagctcanggggancctgtccttcnttgccaagaatgacgagggtgcganccacgagaagctggacttcaggctgcactttcagctgcagcttcntacttgatcaccactccctgctacagtgacncntttgctaanttgctggantctgggggantnnncntgancttcattcaagtcnatggctttcggatgttcttncnnatttttntggngaaaatntgttttncccccnttttt

SEQ ID NO: 102 - DNA, 1179 bp, Homo Sapiens
  misc_feature (1)..(1): n is a, c, g, or t
  misc_feature (826)..(826): n is a, c, g, or t
  misc_feature (893)..(893): n is a, c, g, or t
  misc_feature (902)..(902): n is a, c, g, or t
  misc_feature (926)..(926): n is a, c, g, or t
  misc_feature (940)..(940): n is a, c, g, or t
  misc_feature (950)..(950): n is a, c, g, or t
  misc_feature (955)..(955): n is a, c, g, or t
  misc_feature (960)..(960): n is a, c, g, or t
  misc_feature (968)..(968): n is a, c, g, or t
  misc_feature (1008)..(1008): n is a, c, g, or t
  misc_feature (1023)..(1023): n is a, c, g, or t
  misc_feature (1029)..(1029): n is a, c, g, or t
  misc_feature (1031)..(1032): n is a, c, g, or t
  misc_feature (1035)..(1035): n is a, c, g, or t
  misc_feature (1040)..(1040): n is a, c, g, or t
  misc_feature (1050)..(1050): n is a, c, g, or t
  misc_feature (1063)..(1063): n is a, c, g, or t
  misc_feature (1070)..(1070): n is a, c, g, or t
  misc_feature (1073)..(1073): n is a, c, g, or t
  misc_feature (1086)..(1086): n is a, c, g, or t
  misc_feature (1098)..(1098): n is a, c, g, or t
  misc_feature (1103)..(1103): n is a, c, g, or t
  misc_feature (1105)..(1105): n is a, c, g, or t
  misc_feature (1108)..(1108): n is a, c, g, or t
  misc_feature (1119)..(1119): n is a, c, g, or t
  misc_feature (1124)..(1124): n is a, c, g, or t
  misc_feature (1126)..(1126): n is a, c, g, or t
  misc_feature (1137)..(1137): n is a, c, g, or t
  misc_feature (1143)..(1143): n is a, c, g, or t
  misc_feature (1152)..(1153): n is a, c, g, or t
  misc_feature (1158)..(1158): n is a, c, g, or t
  misc_feature (1162)..(1162): n is a, c, g, or t
  misc_feature (1172)..(1172): n is a, c, g, or t
  misc_feature (1174)..(1175): n is a, c, g, or t
naattagagaaattactatgagaggatcgcatcaccatcaccatcacggatcctatttaggtgacactatagaatcgtcgacccacgcgtccgggcgactgcggccgaaacctcggcttcagaacccgaggctgagtccaaggctgggcccaaggctgacggagaggaggatgaggttaaggcggctaggacaaggagaaaggtgttatcgcgggctgtggccgctgcgacatacaagaccatggggccagcgtgggatcagcaggaggaaggcgtgagcgagagcgatggggatgagtacgccatggcttcctccgcggagagctcccccggggagtacgagtgggaatatgacgaagaggaggagaaaaaccagctggagattgagagactggaggagcagttgtctatcaacgtctatgactacaactgccatgtggacttgatcagactgctcaggctggaaggggagcttaccaaggtgaggatggcccgccagaagatgagtgaaatctttcccttgactgaagagctctggctggagtggctgcatgacgagatcagcatggcccaggatggcctggacagagagcacgtgtatgacctctttgagaaagccgtgaaggattacatttgtcctaacatttggctagagtatggccagtactcagttggtgggattggtcagaaaggtggccttgagaaagttcgctccgtgtttgaaagggctctctcgtctgttggtttacatatgaccaaaggactcgccctctgggaggcttaccgagagtttgaaagtgcgattgtggaagctgctcggcttganaaagtccacagtcttttccggcgacagttggcgatcccactctatgatatggaggccacatttgcanagtatgaanaatggtcaaaaaacccaataccanagtcagtaattcanaactataacnaagcnctacngcagctgnaaaatataaccctatgaaaaaccctgttgcagccaaagcnccaggctggcaaaantcagcntnntcnatttnaaatgaaatngcgatctgctccnttcattnatnttgacccccctgntcaaaactcctntcccnanttntggatccttcngtccntnctaaatcaacnctaaantaaggattnnttttnttgnaataaccccntnnaaaa

SEQ ID NO: 103 - DNA, 1095 bp, Homo Sapiens
  misc_feature (2)..(4): n is a, c, g, or t
  misc_feature (7)..(7): n is a, c, g, or t
  misc_feature (809)..(809): n is a, c, g, or t
  misc_feature (839)..(839): n is a, c, g, or t
  misc_feature (865)..(865): n is a, c, g, or t
  misc_feature (868)..(868): n is a, c, g, or t
  misc_feature (876)..(876): n is a, c, g, or t
  misc_feature (878)..(878): n is a, c, g, or t
  misc_feature (883)..(883): n is a, c, g, or t
  misc_feature (891)..(891): n is a, c, g, or t
  misc_feature (896)..(896): n is a, c, g, or t
  misc_feature (905)..(906): n is a, c, g, or t
  misc_feature (919)..(919): n is a, c, g, or t
  misc_feature (949)..(949): n is a, c, g, or t
  misc_feature (952)..(952): n is a, c, g, or t
  misc_feature (956)..(956): n is a, c, g, or t
  misc_feature (961)..(961): n is a, c, g, or t
  misc_feature (965)..(965): n is a, c, g, or t
  misc_feature (972)..(972): n is a, c, g, or t
  misc_feature (974)..(974): n is a, c, g, or t
  misc_feature (985)..(985): n is a, c, g, or t
  misc_feature (1001)..(1001): n is a, c, g, or t
  misc_feature (1016)..(1016): n is a, c, g, or t
  misc_feature (1030)..(1030): n is a, c, g, or t
  misc_feature (1038)..(1039): n is a, c, g, or t
  misc_feature (1052)..(1053): n is a, c, g, or t
  misc_feature (1061)..(1061): n is a, c, g, or t
  misc_feature (1066)..(1066): n is a, c, g, or t
  misc_feature (1068)..(1068): n is a, c, g, or t
  misc_feature (1071)..(1071): n is a, c, g, or t
  misc_feature (1073)..(1073): n is a, c, g, or t
  misc_feature (1087)..(1087): n is a, c, g, or t
  misc_feature (1093)..(1095): n is a, c, g, or t
annnaantagaggaaattactatgagaggatcgcatcaccatcaccatcacggaatcctatttaggtgacactatagaatcgtcgacccacgcgtccgcccacgcgtccgccccgacagagacagagacacagccatccgccaccaccgctgccgcagcctggctggggagggggccagccccccaggccccctacccctctgaggtggccagaatggatttgtggccaggggcatggatgctgctgctgctgctcttcctgctgctgctcttcctgctgcccaccctgtggttctgcagccccagtgccaagtacttcttcaagatggccttctacaatggctggatcctcttcctggctgtgctcgccatccctgtgtgtgccgtgcgaggacgcaacgtcgagaacatgaagatcttgcgtctaatgctgctccacatcaaatacctgtacgggatccgagtggaggtgcgaggggctcaccacttccctccctcgcagccctatgttgttgtctccaaccaccagagctctctcgatctgcttgggatgatggaggtactgccaggccgctgtgtgcccattgccaagcgcgagctactgtgggctggctctgccgggctggcctgctggctggcaggagtcatcttcatcgaccggaagcgcacgggggatgccatcagtgtcatgtctgaggtcgcccagaccctgctcacccaggacgtgagggtctgggtgtttcctgagggaacgagaaaccacaatggctccatgctgcccttcaaacgtggcgccttccatcttgcantgcaggcccaggttcccattgtccccatantcatgtcctcctaccaaaacttctantgncaaaaagnancgtcnctttcacntcggnacaaatgtnnaggtgcggggtgntgccccccaagtggcccacggaaagggctnaanaccnaaaangaangttcccnancttttgggttnaaaaaaaaatccgggnacttcccatgctcantggtttttccgggnaaaatctnncaatgaatggccnngggtgggnggtgnantantntaaaaaaaaccctngggggnnn

SEQ ID NO: 104 - DNA, 891 bp, Homo Sapiens
ctatgagaggtcgcatcaccatcaccatcacggatcctatttaggtgacactatagaatcgtcgacccacgcgtccgggaggggaccttgttctccatttcctcacttgatctttcacccgacaccacgtacacgagccaaactcaggctgtaccttgagcagctcaagcaactggtgcccctgggccccgacagcacccgccacaccacgctgagcctcctgaagcgggccaaggtgcacatcaagaaactggaggagcaggaccgccgggcactgagcatcaaggagcagctgcagcaggagcatcgtttcctgaagcggcgcctggagcagctgtcggtgcagagcgtggagcgcgtgcgcacagatagcacgggctctgctgtctccacggacgactcagagcaagaagtggacatagagggcatggagtttggccctggtgagctggacagtgttggcagcagcagtgacgcggacgaccactacagcctgcagagtggcaccggcggcgacagtggcttcgggccccactgccggcggctgggccgccccgccctctcgtaggcccgtgccctctgctccttggcctgcctgcccgccagccacgcgtgtcagccctccagttctccttcagttgacgccagcctctccacaggcccactgctgtgccattctggaagctccagctgctgctgggctgcctggcactgcccgcttgccggtcagggcctgccgagctgcctgccccttccagctgggcagagtcccctgcaaggaggcagggcccagcttccacatccggagccctggtcagcatagccgcccacggtctgttctcagattcctaatcattccagaagtattaaacgtcattgctgcaaacctcg

SEQ ID NO: 105 - DNA, 1179 bp, Homo Sapiens
  misc_feature (892)..(892): n is a, c, g, or t
  misc_feature (902)..(902): n is a, c, g, or t
  misc_feature (916)..(916): n is a, c, g, or t
  misc_feature (954)..(954): n is a, c, g, or t
  misc_feature (974)..(974): n is a, c, g, or t
  misc_feature (980)..(980): n is a, c, g, or t
  misc_feature (986)..(986): n is a, c, g, or t
  misc_feature (1015)..(1015): n is a, c, g, or t
  misc_feature (1020)..(1020): n is a, c, g, or t
  misc_feature (1033)..(1033): n is a, c, g, or t
  misc_feature (1042)..(1042): n is a, c, g, or t
  misc_feature (1047)..(1047): n is a, c, g, or t
  misc_feature (1049)..(1049): n is a, c, g, or t
  misc_feature (1069)..(1069): n is a, c, g, or t
  misc_feature (1071)..(1071): n is a, c, g, or t
  misc_feature (1083)..(1083): n is a, c, g, or t
  misc_feature (1089)..(1089): n is a, c, g, or t
  misc_feature (1091)..(1091): n is a, c, g, or t
  misc_feature (1093)..(1094): n is a, c, g, or t
  misc_feature (1107)..(1107): n is a, c, g, or t
  misc_feature (1117)..(1118): n is a, c, g, or t
  misc_feature (1126)..(1126): n is a, c, g, or t
  misc_feature (1128)..(1128): n is a, c, g, or t
  misc_feature (1132)..(1132): n is a, c, g, or t
  misc_feature (1135)..(1135): n is a, c, g, or t
  misc_feature (1141)..(1141): n is a, c, g, or t
  misc_feature (1146)..(1146): n is a, c, g, or t
  misc_feature (1150)..(1150): n is a, c, g, or t
  misc_feature (1161)..(1162): n is a, c, g, or t
  misc_feature (1168)..(1168): n is a, c, g, or t
  misc_feature (1172)..(1172): n is a, c, g, or t
  misc_feature (1176)..(1176): n is a, c, g, or t
tagagaaattactatgagaggatcgcatcaccatcaccatcacggatcctatttaggtgacactatagaatcgtcgacccacgcgtccgccgccacccacccaaagttggtgatgacagtgacctgagtgaaggctttgaatcggactcaagccatgactcagcccgggccagtgagggctcagacagtggctctgacaagagtcttgaaggtgggggaacggcctttgatgctgaaacagactcggaaatgaatagccaggagtcccgatcagacttggaagatatggaggaagaggaggggacacggtcaccaaccctggagccccctcggggcagatcagaggctcccgattccctcaatggcccactgggccccagtgaggctagcattgccagcaatctacaagccatgtccacccagatgttccagactaagcgctgcttccgactggcccccacctttagcaacctgctcctccagcccaccaccaaccctcatacctcggccagccacaggccttgcgtcaatggggatgtagacaagccttcagagccagcctctgaggagggctctgagtcggaggggagtgagtccagtggacgctcctgtcggaatgagcgcagcatccaggagaagcttcaggtcctgatggccgaaggtctgcttcctgctgtgaaagtcttcctggactggcttcggaccaaccccgacctcatcatcgtgtgtgcgcagagctctcaaagtctgtggaaccgcctgtctgtgttgctgaatctgttgcctgctgctggtgaactccaggagtctggcctggccttgtgtcctgaggtccaagatcttcttgaaggttgtgaactgcctgacctcccctctagccttctgctcccanaggacatggntcttcgtaacctgnccccgctccgagctgcccacagacgctttaactttganacggatcggcccctgctcancacctnaaagantcagtggtgcgcatctgctgcatccgcanctttnggtcatttcatcncccgcctgnaaggnanattcttgcatttcaacccanangttggcatcttncttcancntnncccaatcttaaanagaaaacctnntgcaacangncccnggnaaattnccaantggncaagaagaaanntcctcngaanaggntta

SEQ ID NO: 106 - DNA, 1313 bp, Homo Sapiens
  misc_feature (881)..(881): n is a, c, g, or t
  misc_feature (942)..(942): n is a, c, g, or t
  misc_feature (950)..(950): n is a, c, g, or t
  misc_feature (953)..(953): n is a, c, g, or t
  misc_feature (985)..(985): n is a, c, g, or t
  misc_feature (1003)..(1003): n is a, c, g, or t
  misc_feature (1009)..(1009): n is a, c, g, or t
  misc_feature (1028)..(1030): n is a, c, g, or t
  misc_feature (1033)..(1033): n is a, c, g, or t
  misc_feature (1050)..(1050): n is a, c, g, or t
  misc_feature (1066)..(1066): n is a, c, g, or t
  misc_feature (1082)..(1082): n is a, c, g, or t
  misc_feature (1094)..(1094): n is a, c, g, or t
  misc_feature (1107)..(1107): n is a, c, g, or t
  misc_feature (1112)..(1112): n is a, c, g, or t
  misc_feature (1115)..(1115): n is a, c, g, or t
  misc_feature (1125)..(1125): n is a, c, g, or t
  misc_feature (1129)..(1129): n is a, c, g, or t
  misc_feature (1135)..(1135): n is a, c, g, or t
  misc_feature (1140)..(1140): n is a, c, g, or t
  misc_feature (1146)..(1146): n is a, c, g, or t
  misc_feature (1155)..(1155): n is a, c, g, or t
  misc_feature (1157)..(1157): n is a, c, g, or t
  misc_feature (1159)..(1159): n is a, c, g, or t
  misc_feature (1170)..(1170): n is a, c, g, or t
  misc_feature (1173)..(1173): n is a, c, g, or t
  misc_feature (1177)..(1177): n is a, c, g, or t
  misc_feature (1187)..(1187): n is a, c, g, or t
  misc_feature (1189)..(1189): n is a, c, g, or t
  misc_feature (1194)..(1195): n is a, c, g, or t
  misc_feature (1197)..(1197): n is a, c, g, or t
  misc_feature (1233)..(1233): n is a, c, g, or t
  misc_feature (1244)..(1244): n is a, c, g, or t
  misc_feature (1250)..(1250): n is a, c, g, or t
  misc_feature (1258)..(1258): n is a, c, g, or t
  misc_feature (1293)..(1293): n is a, c, g, or t
  misc_feature (1303)..(1304): n is a, c, g, or t
  misc_feature (1308)..(1308): n is a, c, g, or t
  misc_feature (1310)..(1313): n is a, c, g, or t
tagagagattactatgagaggatcgcatcaccatcaccatcacggatcctatttaggtgacactatagaatcgtcgacccacgcgtccgcaggaaccaaggaaatttgtgtggttcgcttcacaccagtaactgaagaagatcaaatttcttatactttgctctttgcatacttcagtagcagaaagcgctatggagtagctgttaacaacatgaagcaggttaaagatatgtaccttattcctttgggtgccacagataaaattccacaccctcttgtgccttttgatggacctggtaggtatacgttttaataataggataagaatgaaataacatgggaggtgggaccagagtgaaaagactgattctgccttctttctcaggatccagccctctagagatggcttgacagggccaggcaccatttaatatcctgtaataagttagaggcagaattttacctttttttgcaatgattgaaaatgatgaattaattgatgtttttggttttatacagggcttgaactgcatagacctaatctattgttgggcttaattattcgtcagaaactgaagcgacagcacagtgcctgtgctagtactagtcatatagctgagactcctgaaagtgcaccaccaatagcattgccacctgataaaaaaagtaaaatagaagtttctacagaagaagcaccagaggaagaaaatgacttttttaattcttttacaactgtattacacaagcagagaaataaacctcagcagaatcttcaggaagaccttccaacagcagttgaacctttaatggaagtcaccaaacaggagccaccaaaacctttaagatttcttcctggcgtgttgattggctgggaaaatcancctactactctggaattagcaaaataaacctcttcctgtggatgaaataccttcaaagccntttgggcnccnctggtcaagtatatgaccaggccccagtcagngatggaacaaaaccctgnttaaanaaattccctttttaaatgnnnccnaaccccctccaaaatanagaaaaccgaatatgnggaagtaactgatggngaaaacaagggnaaaaaaagttaangtaanaanatttccaaancccnaaaaanccccnaaaaanaacccccgnananggccccttccnttncgcngggccttganancctanncncaaggaacccccaagtttcccaaaaccttttaaaanttttccttccnccaaanaaagaaangggggaaaaaaaaaaattaaaaaccccttcgaaanaaaaaatttnnaaancnnnn

SEQ ID NO: 107 - DNA, 1224 bp, Homo Sapiens
  misc_feature (4)..(10): n is a, c, g, or t
  misc_feature (900)..(900): n is a, c, g, or t
  misc_feature (902)..(902): n is a, c, g, or t
  misc_feature (935)..(935): n is a, c, g, or t
  misc_feature (949)..(949): n is a, c, g, or t
  misc_feature (952)..(952): n is a, c, g, or t
  misc_feature (955)..(955): n is a, c, g, or t
  misc_feature (959)..(959): n is a, c, g, or t
  misc_feature (963)..(963): n is a, c, g, or t
  misc_feature (970)..(970): n is a, c, g, or t
  misc_feature (977)..(977): n is a, c, g, or t
  misc_feature (988)..(988): n is a, c, g, or t
  misc_feature (990)..(990): n is a, c, g, or t
  misc_feature (1028)..(1028): n is a, c, g, or t
  misc_feature (1036)..(1036): n is a, c, g, or t
  misc_feature (1053)..(1053): n is a, c, g, or t
  misc_feature (1057)..(1057): n is a, c, g, or t
  misc_feature (1067)..(1067): n is a, c, g, or t
  misc_feature (1078)..(1078): n is a, c, g, or t
  misc_feature (1085)..(1085): n is a, c, g, or t
  misc_feature (1129)..(1129): n is a, c, g, or t
  misc_feature (1133)..(1133): n is a, c, g, or t
  misc_feature (1161)..(1161): n is a, c, g, or t
  misc_feature (1169)..(1171): n is a, c, g, or t
  misc_feature (1187)..(1187): n is a, c, g, or t
  misc_feature (1189)..(1190): n is a, c, g, or t
  misc_feature (1192)..(1193): n is a, c, g, or t
  misc_feature (1195)..(1195): n is a, c, g, or t
  misc_feature (1199)..(1199): n is a, c, g, or t
  misc_feature (1205)..(1205): n is a, c, g, or t
  misc_feature (1209)..(1209): n is a, c, g, or t
  misc_feature (1219)..(1219): n is a, c, g, or t
  misc_feature (1224)..(1224): n is a, c, g, or t
accnnnnnnncaatagagaaaattactatgagaggatcgcatcaccatcaccatcacggatcctatttaggtgacactatagaatcgtcgacccacgcgtccggcgctctggggcccggcggtggcggcggcggcggcggcggcggtggtggtggcgggccggggcatgagcaggaggaggattaccgctacgaggtgctcacggccgagcagattctacaacacatggtggaatgtatccgggaggtcaacgaggtcatccagaatccagcaactatcacaagaatactccttagccacttcaattgggataaagagaagctaatggaaaggtactttgatggaaacctggagaagctctttgctgagtgtcatgtaattaatccaagtaaaaagtctcgaacacgccagatgaatacaaggtcatcagcacaggatatgccttgtcagatctgctacttgaactaccctaactcgtatttcactggccttgaatgtggacataagttttgtatgcagtgctggagtgaatatttaactaccaaaataatggaagaaggcatgggtcagactatttcgtgtcctgctcatggttgtgatatcttagtggatgacaacacagttatgcgcctgatcacagattcaaaagttaaattaaagtatcagcatttaataacaaatagctttgtagagtgcaatcgactgttaaagtggtgtcctgccccagattgccaccatgttgttaaagtccaatatcctgatgctaaacctgttcgctgcaaatgtgggcgccaattttgctttaactgtggagaaaattggcatgatcctgttaaatgtaagtggttaaaagaaatggattaaaaagtgtgatgatgacagtgaaacctccaattggantngcagcccaacacaaaggaatgtcccaaatgccnatgtcacaattganaangangggnggtngtaatcncatggtnctgtccgtaancnaaaattgtaaaaccaaaatttttgctggggtgtgttcntggccccntgggaaacccccatggnatcntgccctgggnacaactgtaanccccctntaaatgaagaatgaatgccaaggcccccaaaaaaatgccccagnaacnaatctagggcaccccctgccaaaggaanccggttcnnnctgtaaacccccttantnnanncncatnccaaancccngccccctttnaaccn

SEQ ID NO: 108 - DNA, 1179 bp, Homo Sapiens
  misc_feature (1)..(1): n is a, c, g, or t
  misc_feature (4)..(4): n is a, c, g, or t
  misc_feature (774)..(774): n is a, c, g, or t
  misc_feature (885)..(885): n is a, c, g, or t
  misc_feature (952)..(952): n is a, c, g, or t
  misc_feature (954)..(954): n is a, c, g, or t
  misc_feature (960)..(960): n is a, c, g, or t
  misc_feature (988)..(988): n is a, c, g, or t
  misc_feature (1000)..(1000): n is a, c, g, or t
  misc_feature (1011)..(1011): n is a, c, g, or t
  misc_feature (1014)..(1014): n is a, c, g, or t
  misc_feature (1021)..(1021): n is a, c, g, or t
  misc_feature (1038)..(1038): n is a, c, g, or t
  misc_feature (1040)..(1040): n is a, c, g, or t
  misc_feature (1056)..(1057): n is a, c, g, or t
  misc_feature (1061)..(1061): n is a, c, g, or t
  misc_feature (1068)..(1069): n is a, c, g, or t
  misc_feature (1080)..(1080): n is a, c, g, or t
  misc_feature (1082)..(1082): n is a, c, g, or t
  misc_feature (1095)..(1095): n is a, c, g, or t
  misc_feature (1109)..(1109): n is a, c, g, or t
  misc_feature (1115)..(1115): n is a, c, g, or t
  misc_feature (1129)..(1129): n is a, c, g, or t
  misc_feature (1145)..(1145): n is a, c, g, or t
  misc_feature (1148)..(1148): n is a, c, g, or t
  misc_feature (1157)..(1157): n is a, c, g, or t
naantagagaaattactatgagaggatcgcatcaccatcaccatcacggatcctatttaggtgacactatagaatcgtcgacccacgcgtccggcgaaggtttgaaattgagtaccagggggacccggagctgcagcccatccggagctatgagatcgccagcttggtccgcacactctttaggctgtcgtctgccatcaaccacagatttgcaggacagatggcggctctgtgttcccgggatgacttcctcggcagcttctgtcgctaccacctcacagaacctgggctggccagcaggcacctgctgagccctgtggggcggaggcaggtggccggccacacccgcggccccaggctcagcctgcgcttcctgggcagttaccggacgctggtctcgctgctgctggccttcttcgtggcctctctgttctgcgtcgggcccctcccatgcacgctgctgctcaccctgggctatgtcctctacgcctctgccatgacactgctgaccgagcgggggaagctgcaccagccctgaaggtgtcagctgccttcagagcaggctggagggatttgccacacagccccacccttgggctgagaggacctgggaagcccctccaggagggaacacggtcatcctcgggcttctggagcggggttcctgcagccgcagaggcatctggaggaaacgcaaccaagaaaggaaggcaggtgggccccagcaaaggagtagctgccagggctcaacagctacgctctgtgacagcgcanagctcagcgccggcctttccctccctccgccaaggactcacggccaagccagctctcggggccttttttccagtgcccatttggctactctgctgcaccaagcttgggaanccagcctgccaacagccacctgggcctggcctccccactggctggccttgaagttggcaaaatgggntngtggcncttccctctctctgtgtgggaacagaanagtggctttaantctccactccnagnaaaaaancaaaatttctaaaagtngngaaaaaaacaaaaaanngggntgtcctnnattcttcaatngngaaggggggtttntttatgtttctccnaacttnttcaaaaaatgggncgtaaaaattccatgnttncaagaaccnaaaaccctcccaaaacccaagg

SEQ ID NO: 109 - DNA, 1280 bp, Homo Sapiens
  misc_feature (1)..(1): n is a, c, g, or t
  misc_feature (832)..(832): n is a, c, g, or t
  misc_feature (854)..(854): n is a, c, g, or t
  misc_feature (862)..(862): n is a, c, g, or t
  misc_feature (864)..(864): n is a, c, g, or t
  misc_feature (894)..(894): n is a, c, g, or t
  misc_feature (942)..(942): n is a, c, g, or t
  misc_feature (944)..(944): n is a, c, g, or t
  misc_feature (952)..(952): n is a, c, g, or t
  misc_feature (954)..(954): n is a, c, g, or t
  misc_feature (996)..(996): n is a, c, g, or t
  misc_feature (1011)..(1011): n is a, c, g, or t
  misc_feature (1031)..(1031): n is a, c, g, or t
  misc_feature (1035)..(1035): n is a, c, g, or t
  misc_feature (1078)..(1078): n is a, c, g, or t
  misc_feature (1080)..(1080): n is a, c, g, or t
  misc_feature (1083)..(1083): n is a, c, g, or t
  misc_feature (1094)..(1094): n is a, c, g, or t
  misc_feature (1106)..(1106): n is a, c, g, or t
  misc_feature (1108)..(1108): n is a, c, g, or t
  misc_feature (1111)..(1112): n is a, c, g, or t
  misc_feature (1115)..(1115): n is a, c, g, or t
  misc_feature (1124)..(1124): n is a, c, g, or t
  misc_feature (1127)..(1127): n is a, c, g, or t
  misc_feature (1133)..(1133): n is a, c, g, or t
  misc_feature (1142)..(1142): n is a, c, g, or t
  misc_feature (1147)..(1147): n is a, c, g, or t
  misc_feature (1150)..(1151): n is a, c, g, or t
  misc_feature (1172)..(1172): n is a, c, g, or t
  misc_feature (1177)..(1177): n is a, c, g, or t
  misc_feature (1194)..(1194): n is a, c, g, or t
  misc_feature (1215)..(1215): n is a, c, g, or t
  misc_feature (1226)..(1226): n is a, c, g, or t
  misc_feature (1240)..(1240): n is a, c, g, or t
  misc_feature (1243)..(1243): n is a, c, g, or t
  misc_feature (1246)..(1246): n is a, c, g, or t
  misc_feature (1266)..(1266): n is a, c, g, or t
  misc_feature (1268)..(1268): n is a, c, g, or t
  misc_feature (1278)..(1278): n is a, c, g, or t
  misc_feature (1280)..(1280): n is a, c, g, or t
naattagagaaaattactatgagaggatcgcatcaccatcaccatcacggatcctatttaggtgacactatagaatcgtcgacccacgcgtccgaaacaatcccgacccggagtggacaggtgaggaggggaggacttgcctcgccgaggccgctgcgaggagcgtgcccaagggcgaaggtccagggaacccggctcccgcgcaccgaagacggccgccatgccggcccgttgtgtggccgcccactgcggcaacaccaccaagtctgggaagtcgctgttccgctttcccaaggaccgggccgtgcggctgctctgggaccgcttcgtgcggggctgccgcgccgactggtacggaggcaatgaccgctcggtcatctgctctgaccactttgccccagcctgttttgacgtctcttcggttatccagaagaacctgcgcttctcccagcgcctgaggctggtggcaggcgccgtgcccaccctgcaccgggtgcccgccccggcacctaagaggggagaggagggagaccaagcaggccgcctggacacgagaggagagctccaggcagccaggcattctgaggctgccccaggtccagtctcctgtacacgcccccgagctgggaagcaggctgcagcttcacagattacgtgtgaaaatgaacttgtgcaaacccaaccccatgctgataatccatctaatactgtcacttcagtacctactcactgtgaagaaggcccagtgcataaaagtacacaaatttctttgaaaaggccccgtcaccgtagtgtgggtattcaagccaaagtgaaagcgtttggaaaaaanactgtgtaatgcaactactcanaaagaagnantgtggtctaaaacttcctctctctttgaanattttactcccagtgattcaaaaacaaatacaaactgggaatatcaananttgaacanantgatttgttcttatatgggctgtacaggggaaaaaaaaaaanatgtttaaaacttcnacatccaatggctctgatgngctnaaaaattttcaaaattttttacccaaaaaattattttcttttncnttngaaaatctttncctttcaaaaananttnnaangtttaaatntcnccaaantttttttancttcnaanngaaaaatttttttttgttttncccanaaatgaaaaaaaaaacntaccccaaaaaaacccctttnccaaatttccntttttttttttttnaanccntttggaaaaaaacagggttnanaaaaaaaccnan

SEQ ID NO: 110 - DNA, 1073 bp, Homo Sapiens
  misc_feature (739)..(739): n is a, c, g, or t
  misc_feature (748)..(748): n is a, c, g, or t
  misc_feature (782)..(782): n is a, c, g, or t
  misc_feature (801)..(801): n is a, c, g, or t
  misc_feature (834)..(834): n is a, c, g, or t
  misc_feature (848)..(848): n is a, c, g, or t
  misc_feature (860)..(860): n is a, c, g, or t
  misc_feature (874)..(874): n is a, c, g, or t
  misc_feature (880)..(880): n is a, c, g, or t
  misc_feature (882)..(882): n is a, c, g, or t
  misc_feature (907)..(907): n is a, c, g, or t
  misc_feature (910)..(910): n is a, c, g, or t
  misc_feature (934)..(934): n is a, c, g, or t
  misc_feature (951)..(951): n is a, c, g, or t
  misc_feature (957)..(957): n is a, c, g, or t
  misc_feature (966)..(966): n is a, c, g, or t
  misc_feature (968)..(968): n is a, c, g, or t
  misc_feature (979)..(980): n is a, c, g, or t
  misc_feature (985)..(985): n is a, c, g, or t
  misc_feature (987)..(987): n is a, c, g, or t
  misc_feature (989)..(990): n is a, c, g, or t
  misc_feature (993)..(993): n is a, c, g, or t
  misc_feature (1001)..(1001): n is a, c, g, or t
  misc_feature (1020)..(1020): n is a, c, g, or t
  misc_feature (1029)..(1029): n is a, c, g, or t
  misc_feature (1035)..(1035): n is a, c, g, or t
  misc_feature (1050)..(1050): n is a, c, g, or t
  misc_feature (1052)..(1052): n is a, c, g, or t
  misc_feature (1054)..(1055): n is a, c, g, or t
  misc_feature (1057)..(1057): n is a, c, g, or t
  misc_feature (1064)..(1064): n is a, c, g, or t
tagagaaattactatgagaggatcgcatcaccatcaccatcacggatcctatttaggtgacactatagaatcgtcgacccacgcgtccgcccacgcgtccgcccacgcgtccggggaaagatggcggcgactctgggaccccttgggtcgtggcagcagtggcggcgatgtttgtcggctcgggatgggtccaggatgttactccttcttcttttgttggggtctgggcaggggccacagcaagtcggggcgggtcaaacgttcgagtacttgaaacgggagcactcgctgtcgaagccctaccagggtgtgggcacaggcagttcctcactgtggaatctgatgggcaatgccatggtgatgacccagtatatccgccttaccccagatatgcaaagtaaacagggtgccttgtggaaccgggtgccatgtttcctgagagactgggagttgcaggtgcacttcaaaatccatggacaaggaaagaagaatctgcatggggatggcttggcaatctggtacacaaaggatcggatgcagccagggcctgtgtttggaaacatggacaaatttgtggggctgggagtatttgtagacacctaccccaatgaggagaagcagcaagaggcccagaagaggcgatattctccaggagtccagcgggtattcccctacatctcagccatggtgaacaacggctccctcagctatgatcatgagcgggatgggcggcctacanagctgggangctgcacagccattgtccgcaaatcttcattacnacaccttcctggtgattcnctacgtcaagaagcatttgacgataatgatggnatattgatggcaancatgaatggaanggactgcattgaantgcccngnaatccgcctgccccgcggctactanttncggcacctcctccatcactggggnatctcccaaaaaaaccntgaagnccatttccntnaaaattttttnnaactnanannggnaaaaaaanccccaaaaaaaaaaaaaanctcccctcnaaaatntttttctttgccccncnanngnaaaaaanaaaaaactt

SEQ ID NO: 111 - DNA, 971 bp, Homo Sapiens
  misc_feature (699)..(699): n is a, c, g, or t
  misc_feature (731)..(731): n is a, c, g, or t
  misc_feature (741)..(741): n is a, c, g, or t
  misc_feature (748)..(748): n is a, c, g, or t
  misc_feature (751)..(751): n is a, c, g, or t
  misc_feature (753)..(753): n is a, c, g, or t
  misc_feature (780)..(780): n is a, c, g, or t
  misc_feature (788)..(788): n is a, c, g, or t
  misc_feature (794)..(794): n is a, c, g, or t
  misc_feature (813)..(813): n is a, c, g, or t
  misc_feature (820)..(820): n is a, c, g, or t
  misc_feature (829)..(829): n is a, c, g, or t
  misc_feature (850)..(850): n is a, c, g, or t
  misc_feature (862)..(862): n is a, c, g, or t
  misc_feature (878)..(879): n is a, c, g, or t
  misc_feature (886)..(888): n is a, c, g, or t
  misc_feature (892)..(892): n is a, c, g, or t
  misc_feature (902)..(902): n is a, c, g, or t
  misc_feature (904)..(904): n is a, c, g, or t
  misc_feature (906)..(906): n is a, c, g, or t
  misc_feature (915)..(915): n is a, c, g, or t
  misc_feature (928)..(928): n is a, c, g, or t
  misc_feature (932)..(932): n is a, c, g, or t
  misc_feature (939)..(939): n is a, c, g, or t
  misc_feature (943)..(943): n is a, c, g, or t
  misc_feature (951)..(951): n is a, c, g, or t
  misc_feature (953)..(953): n is a, c, g, or t
  misc_feature (955)..(955): n is a, c, g, or t
  misc_feature (960)..(960): n is a, c, g, or t
  misc_feature (969)..(969): n is a, c, g, or t
tagaggaaattactatgagaggatcgcatcaccatcaccatcacggatcctatttaggtgacactatagaatcgtcgacccacgcgtccgggggcaggaccctgtcctcacctcgccacctttttgcagtccgccagttccttgggagtggggtcagccctgacttggccaacgaggacggcctgacggccctgcaccagtgctgcattgatgatttccgagagatggtgcagcagctcctggaggctggggccaacatcaatgcctgtgacagtgagtgctggacgcctctgcatgctgcggccacctgcggccacctgcacctggtggagctgctcatcgccagtggcgccaatctcctggcggtcaacaccgacgggaacatgccctatgacctgtgtgatgatgagcagacgctggactgcctggagactgccatggccgaccgtggcatcacccaggacagcatcgaggccgcccgggccgtgccagaactgcgcatgctggacgacatccggagccggctgcaggccggggcagacctccatgcccccctggaccacggggccacgctggtgagggctggggggtgaggggcacacggggctgggggcctcgctacttggaggtgggggatggggccgaattcaggccgggcgcttgcctgcagctgcacgtcgcaaccgccaacgggttcancgaggcggctgccctgctgctggaacaccganccagcctgancgctaangancnaaaacggctgggaaccgctgcacgccncggcctantggggnccaagtgcccctggtgganctgctcntggcgcaangggcccaactgaaacccaaanttccctgatggnaaaaaaaccccccttnnatttttnnngggnaaaaaaaaantncnggcccaaanttgcttgaaattnaaanaaaaaanaaanaaaccccntntnggggncccaaaaancc

SEQ ID NO: 112 - DNA, 1179 bp, Homo Sapiens
  misc_feature (1)..(1): n is a, c, g, or t
  misc_feature (798)..(798): n is a, c, g, or t
  misc_feature (803)..(803): n is a, c, g, or t
  misc_feature (831)..(831): n is a, c, g, or t
  misc_feature (849)..(849): n is a, c, g, or t
  misc_feature (851)..(851): n is a, c, g, or t
  misc_feature (857)..(857): n is a, c, g, or t
  misc_feature (865)..(865): n is a, c, g, or t
  misc_feature (870)..(870): n is a, c, g, or t
  misc_feature (878)..(878): n is a, c, g, or t
  misc_feature (908)..(908): n is a, c, g, or t
  misc_feature (931)..(932): n is a, c, g, or t
  misc_feature (938)..(938): n is a, c, g, or t
  misc_feature (958)..(958): n is a, c, g, or t
  misc_feature (966)..(966): n is a, c, g, or t
  misc_feature (976)..(976): n is a, c, g, or t
  misc_feature (993)..(993): n is a, c, g, or t
  misc_feature (997)..(997): n is a, c, g, or t
  misc_feature (1015)..(1015): n is a, c, g, or t
  misc_feature (1031)..(1032): n is a, c, g, or t
  misc_feature (1039)..(1039): n is a, c, g, or t
  misc_feature (1042)..(1042): n is a, c, g, or t
  misc_feature (1069)..(1069): n is a, c, g, or t
  misc_feature (1071)..(1071): n is a, c, g, or t
  misc_feature (1075)..(1075): n is a, c, g, or t
  misc_feature (1082)..(1082): n is a, c, g, or t
  misc_feature (1088)..(1088): n is a, c, g, or t
  misc_feature (1098)..(1098): n is a, c, g, or t
  misc_feature (1102)..(1102): n is a, c, g, or t
  misc_feature (1106)..(1106): n is a, c, g, or t
  misc_feature (1112)..(1112): n is a, c, g, or t
  misc_feature (1115)..(1115): n is a, c, g, or t
  misc_feature (1158)..(1158): n is a, c, g, or t
  misc_feature (1164)..(1164): n is a, c, g, or t
  misc_feature (1171)..(1171): n is a, c, g, or t
  misc_feature (1175)..(1175): n is a, c, g, or t
  misc_feature (1177)..(1178): n is a, c, g, or t
naatagagaaattactatgagaggatcgcatcaccatcaccatcacggatcctatttaggtgacactatagaatcgtcgacccacgcgtccgcccacgcgtccgccttcgcgcagatcgcgcacctgacccagcaccggcgcgtgcacacgggcgagaagccctacacgtgccaggactgcggcgcgctcttcagccagagcgcctctctggccgagcaccggcgcatccacacaggcgagaagccctacgcgtgcggccagtgcgccaaggccttcacccaggtgtcgcacctgacgcagcaccagcgcacgcacaccggagagcggccttacccctgccacgactgcggcaagcgcttcagcaaccgctcccacctcctccagcaccgcctcgtgcacaccggtgagcggccctacaggtgcctgcaatgcggggccgccttcagccacgtgtcctcgcttatagagcaccagaagatccacaccggagagcggccctacaagtgcggcgagtgcggcaaagctttcagccagggctcctcgctcgccctgcaccagcgcacgcacacgggcgagcggccctacacctgccccgagtgcggcaaggccttcagcaaccgctcctacctgatccagcaccacatcgtgcacaccggggagaagccctacgagtgcagcggctgcgggaaggccttcagcttctcctccgcgctcatccgacaccagaggacgcatgcagacagttcgggacgcctttgcccagctccacgcctgactcaacacctgggctctcaaanggagnaaaaacctgtcaacaggggtgccctggnaaaaacccgcgtggaacnancaaaanattaaganctgangggcctcntttccaacctcacaaatggttatggggganataatgttgtttttccccgaacnnttcttntgaaggaaaaccgaaggctnaaaaaaanctttgttaantttgcctttaaggcacncaantggggaaaaacaaagggnttaaaaatgtaccttnnaattttngcnaaaattcccctgggggttttccttggngnaaanttaaaantggggnaagggcaaanaaanctgnaaaaanaanctatgggtgggcttttaattttttttttttttttttaaaaaangttttnttttttncccnannc

SEQ ID NO: 113 - DNA, 1116 bp, Homo Sapiens
  misc_feature (880)..(880): n is a, c, g, or t
  misc_feature (910)..(910): n is a, c, g, or t
  misc_feature (922)..(922): n is a, c, g, or t
  misc_feature (945)..(945): n is a, c, g, or t
  misc_feature (952)..(952): n is a, c, g, or t
  misc_feature (959)..(959): n is a, c, g, or t
  misc_feature (972)..(972): n is a, c, g, or t
  misc_feature (976)..(976): n is a, c, g, or t
  misc_feature (993)..(993): n is a, c, g, or t
  misc_feature (1008)..(1008): n is a, c, g, or t
  misc_feature (1013)..(1013): n is a, c, g, or t
  misc_feature (1016)..(1017): n is a, c, g, or t
  misc_feature (1025)..(1026): n is a, c, g, or t
  misc_feature (1035)..(1035): n is a, c, g, or t
  misc_feature (1045)..(1047): n is a, c, g, or t
  misc_feature (1058)..(1058): n is a, c, g, or t
  misc_feature (1062)..(1062): n is a, c, g, or t
  misc_feature (1064)..(1064): n is a, c, g, or t
  misc_feature (1077)..(1077): n is a, c, g, or t
  misc_feature (1084)..(1084): n is a, c, g, or t
  misc_feature (1089)..(1089): n is a, c, g, or t
  misc_feature (1091)..(1093): n is a, c, g, or t
  misc_feature (1099)..(1099): n is a, c, g, or t
  misc_feature (1104)..(1104): n is a, c, g, or t
  misc_feature (1113)..(1113): n is a, c, g, or t
  misc_feature (1115)..(1115): n is a, c, g, or t
tagaggaaattactatgagaggatcgcatcaccatcaccatcacggatcctatttaggtgacactatagaatcgtcgacccacgcgtccggaagaaaattggaggaatctgcttcatttgaatctctttctccatcatctagaccagcttctcccactaggtcccaggcacaaactccagttttaagtccttcccttcctgatatgtctctatccacacattcgtctgttcaggctggtggatggcgaaaactcccacctaatctcagtcccactatagagtataatgatggaagaccagcaaagcgccatgatattgcacggtctcattctgaaagtccttctagacttccaatcaataggtcaggaacctggaaacgtgagcacagcaaacattcatcatcccttcctcgagtaagcacttggagaagaactggaagttcatcttcaattctttctgcttcatcagaatccagtgaaaaagcaaaaagtgaggatgaaaaacatgtgaactctatttcaggaaccaaacaaagtaaagaaaaccaagtatccgcaaaaggaacatggagaaaaataaaagaaaatgaattttctcccacaaatagtacttctcagaccgtttcctcaggtgctacaaatggtgctgaatcaaagactctaatttatcaaatggcacctgctgtttctaaaacagaggatgtttgggtgagaattgaggactgtcccattaacaatcctagatctggaagatctcccacaggtaatactcccccggtgattgacagtgtttcagaaaaggcaaatccaaacattaaagattcaaaagataatcaggcaaaacaaaatgtgggtaatggcagtgttcccatgcgtaccgngggtttggaaaatcgcctgaactcctttantcaggggggagncccctgaccaaaaaggaactganataaaanccagganaaaataatcctgntccntgtatcaaaaaactaanggaaagttctaaagnggaanggnncccattcnnttctagcanctcagcaaannnagttcccctangggnanggtgccgccaaanggactcntttantnnnacccanccccngaaaaaccncnc

SEQ ID NO: 114 - DNA, 1132 bp, Homo Sapiens
  misc_feature (949)..(949): n is a, c, g, or t
  misc_feature (964)..(964): n is a, c, g, or t
  misc_feature (973)..(973): n is a, c, g, or t
  misc_feature (996)..(996): n is a, c, g, or t
  misc_feature (1001)..(1002): n is a, c, g, or t
  misc_feature (1028)..(1028): n is a, c, g, or t
  misc_feature (1031)..(1031): n is a, c, g, or t
  misc_feature (1034)..(1034): n is a, c, g, or t
  misc_feature (1053)..(1053): n is a, c, g, or t
  misc_feature (1055)..(1055): n is a, c, g, or t
  misc_feature (1074)..(1075): n is a, c, g, or t
  misc_feature (1080)..(1080): n is a, c, g, or t
  misc_feature (1084)..(1085): n is a, c, g, or t
  misc_feature (1094)..(1094): n is a, c, g, or t
  misc_feature (1103)..(1103): n is a, c, g, or t
  misc_feature (1110)..(1110): n is a, c, g, or t
  misc_feature (1115)..(1115): n is a, c, g, or t
  misc_feature (1118)..(1118): n is a, c, g, or t
  misc_feature (1121)..(1122): n is a, c, g, or t
  misc_feature (1124)..(1124): n is a, c, g, or t
  misc_feature (1129)..(1129): n is a, c, g, or t
gattagagaaattactatgagaggatcgcatcaccatcaccatcacggatcctatttaggtgacactatagaatcgtcgacccacgcgtccggcacagtctccagagatgaagtgagaaggaaaaaagcagtttataagaaggctgaacttgctaaaaaaacagaagttcaggcccactctccctccaggaaattcattttaaaacctgctatcaaatatactagaccaactcatctctcctgtgttaagcggaaaaccacagcagcaggtggggaatcagctctggctcccagtgtatttaaacaggcaaaggacaaagtctctgacggagtaaccaagagcccagaaaagcgctcttctctcccaagaccttcctccattctccctcctcggcgaggtgtgtcaggagacagagatgagaattccttctctctcaacagttctatctcttcttcagcacggcggaccaccaggtcagagccaattcgcagagcagggaagagtggtacctcaacacccactacccctgggtctactgccatcactcctggcaccccaccaagttattcttcacgcacaccaggcactcctggaacccctagctatcccaggacccctcacacaccaggaacccccaagtctgccatcttggtgccgagtgagaagaaggtcgccatcatacgtactcctccaaaatctcctgcgactcccaagcagcttcggcttattaaccaaccactgccagacctgaagaatgtcaaatccaaaatcggatcaacagacaacatcaaataccagcctaaaggggggcaggtacaaattgttaccaagaaaatagacctaagccatgtgacatccaaatgtggctctctgaagaacatccgccacaggccaggtggcggacgtgtgaaaaattgagagtgtaaaactagatttcaaagaaaaggnccaagctaagttggntctcttganatgctcatcatgtacctggaggnggtanngtcagaattgacagccaaaagttganctncanaaagcatgctaaagcccgngnggaccatggggctgaaatnnttaancagnnccccaggcnaatccgggngggatcnccccnaanacnnanaatgnttt

SEQ ID NO: 115 - DNA, 1194 bp, Homo Sapiens
  misc_feature (921)..(921): n is a, c, g, or t
  misc_feature (927)..(927): n is a, c, g, or t
  misc_feature (971)..(971): n is a, c, g, or t
  misc_feature (987)..(987): n is a, c, g, or t
  misc_feature (1009)..(1009): n is a, c, g, or t
  misc_feature (1019)..(1019): n is a, c, g, or t
  misc_feature (1023)..(1023): n is a, c, g, or t
  misc_feature (1058)..(1058): n is a, c, g, or t
  misc_feature (1074)..(1074): n is a, c, g, or t
  misc_feature (1076)..(1076): n is a, c, g, or t
  misc_feature (1090)..(1090): n is a, c, g, or t
  misc_feature (1093)..(1093): n is a, c, g, or t
  misc_feature (1095)..(1095): n is a, c, g, or t
  misc_feature (1097)..(1097): n is a, c, g, or t
  misc_feature (1106)..(1106): n is a, c, g, or t
  misc_feature (1108)..(1108): n is a, c, g, or t
  misc_feature (1111)..(1111): n is a, c, g, or t
  misc_feature (1114)..(1115): n is a, c, g, or t
  misc_feature (1122)..(1123): n is a, c, g, or t
  misc_feature (1134)..(1134): n is a, c, g, or t
  misc_feature (1147)..(1147): n is a, c, g, or t
  misc_feature (1156)..(1156): n is a, c, g, or t
  misc_feature (1163)..(1163): n is a, c, g, or t
  misc_feature (1178)..(1178): n is a, c, g, or t
  misc_feature (1189)..(1189): n is a, c, g, or t
  misc_feature (1191)..(1191): n is a, c, g, or t
tagagaaattactatgagaggatcgcatcaccatcaccatcacggatcctatttaggtgacactatagaatcgtcgacccacgcgtccgggccctgccctgctctactctgcgctctctgcccgcgccgccgccgcctcagcctcggccctgcgctgcgcgcccggcccgtgctgccatggcctgccgcccgcgaagcccgccgaggcatcagagccgctgcgacggtgacgccagcccgccgtcccccgcgcgatggagcctgggacggaagcgcagagccgacggcaggcgctggaggcccgaagacgccgaggaggcagagcaccgcggcgccgagcgcagacccgagagctttaccactcctgaaggccctaaaccccgttccagatgctctgactgggcaagtgcagttgaagaagatgaaatgaggaccagagttaacaaagaaatggcaagatataaaaggaaactcctcatcaatgactttggaagagagagaaaatcatcatcaggaagttctgattcaaaggagtctatgtctactgtgccggctgactttgagacagatgaaagtgtcctaatgaggagacagaagcagatcaactatgggaagaacacaattgcctatgatcgttatattaaagaagtcccaagacaccttcgacaacctggcattcatcccaagacccctaataaatttaagaagtatagtcgacgttcatgggaccagcaaatcaaactctggaaggtggctctgcatttttgggatcctccagcggaagaaggatgtgatttgcaagaaatacaccctgtagaccttgaatctgcaaaaagcagctccgagccccagaccagctctcaggatgactttgatgtgtactctggcacacccaccaaggtgagacacatggacagtcangtgganggatgagtttgatttggaagcttgtttaactgaacccttgaaanacttctcagccatganctactgccccctggcggccagnaaaaaaaacnctcntccccgactaggtggaaggttggccaggccccaancatggggggggcattntnactgggggtttttnttntnancaatccatnanctnagnntgaattnnttttgccttanttttttaaaaaantttattttnttttaanggggttatttttgcntttttaaattngnaag

SEQ ID NO: 116 - DNA, 1318 bp, Homo Sapiens
  misc_feature (1)..(1): n is a, c, g, or t
  misc_feature (855)..(855): n is a, c, g, or t
  misc_feature (911)..(911): n is a, c, g, or t
  misc_feature (915)..(915): n is a, c, g, or t
  misc_feature (921)..(921): n is a, c, g, or t
  misc_feature (993)..(993): n is a, c, g, or t
  misc_feature (996)..(996): n is a, c, g, or t
  misc_feature (999)..(999): n is a, c, g, or t
  misc_feature (1035)..(1035): n is a, c, g, or t
  misc_feature (1041)..(1041): n is a, c, g, or t
  misc_feature (1047)..(1047): n is a, c, g, or t
  misc_feature (1055)..(1055): n is a, c, g, or t
  misc_feature (1057)..(1057): n is a, c, g, or t
  misc_feature (1079)..(1079): n is a, c, g, or t
  misc_feature (1090)..(1090): n is a, c, g, or t
  misc_feature (1103)..(1103): n is a, c, g, or t
  misc_feature (1112)..(1112): n is a, c, g, or t
  misc_feature (1114)..(1115): n is a, c, g, or t
  misc_feature (1124)..(1124): n is a, c, g, or t
  misc_feature (1126)..(1126): n is a, c, g, or t
  misc_feature (1138)..(1138): n is a, c, g, or t
  misc_feature (1143)..(1143): n is a, c, g, or t
  misc_feature (1167)..(1167): n is a, c, g, or t
  misc_feature (1169)..(1169): n is a, c, g, or t
  misc_feature (1172)..(1173): n is a, c, g, or t
  misc_feature (1204)..(1204): n is a, c, g, or t
  misc_feature (1210)..(1211): n is a, c, g, or t
  misc_feature (1236)..(1236): n is a, c, g, or t
  misc_feature (1260)..(1260): n is a, c, g, or t
  misc_feature (1263)..(1263): n is a, c, g, or t
  misc_feature (1265)..(1265): n is a, c, g, or t
  misc_feature (1270)..(1270): n is a, c, g, or t
  misc_feature (1273)..(1273): n is a, c, g, or t
  misc_feature (1276)..(1276): n is a, c, g, or t
  misc_feature (1278)..(1278): n is a, c, g, or t
  misc_feature (1282)..(1282): n is a, c, g, or t
  misc_feature (1290)..(1290): n is a, c, g, or t
  misc_feature (1292)..(1292): n is a, c, g, or t
  misc_feature (1311)..(1311): n is a, c, g, or t
naattagaggaaattactatgagaggatcgcatcaccatcaccatcacggatcctatttaggtgacactatagaatcgtcgacccacgcgtccggctggggaacgatgcctacaagaagaaagactttgacacagccttgaagcattacgacaaagccaaggagctggaccccactaacatgacttacattaccaatcaagcagcggtatactttgaaaagggcgactacaataagtgccgggagctttgtgagaaggccattgaagtggggagagaaaaccgagaagactatcgacagattgccaaagcatatgctcgaattggcaactcctacttcaaagaagaaaagtacaaggatgccatccatttctataacaagtctctggcagagcaccgaaccccagatgtgctcaagaaatgccagcaggcagagaaaatcctgaaggagcaagagcggctggcctacataaaccccgacctggctttggaggagaagaacaaaggcaacgagtgttttcagaaaggggactatccccaggccatgaagcattatacagaagccatcaaaaggaacccgaaagatgccaaattatacagcaatcgagctgcctgctacaccaaactcctggagttccagctggcactcaaggactgtgaggaatgtatccagctggagccgaccttcatcaagggttatacacggaaagccgctgcgctggaagcgatgaaggactacaccaaagccatggatgtgtaccagaaggcgctagacctggactccagctgtaaggaggcggcagacggctaccagcgctgtatgatggcgcagtacaaccggcacgacagccccgaanatgtgaagcgacgagccatggccgaccctgaggtgcagcagatcatgagtgacccngccntgcgcnttatcctggaacaaatgcagaaggaccccccaggccactcagcgaacactttaaagaatcctggtaatagcncanaanatccaaaacttgatggatggggggtctgaattgcanttcggngaaganttgtttcntncccccttttcctttccccctcntggggaaaaangaacttgggaacnccggccaancnncccggaacngnaagggaaaaacnggggnaaaaaaagcccccctccccccttnanttnnaacaaaacccccggggaaaaaaccaaaaaanctcctnncctggcccttttttttgcccccccntttcctttggggccctcccaaaanaancnggggnctnttncncccntgcccccnanttccaggtcctttccccgnccccaat

SEQ ID NO: 117 - DNA, 1179 bp, Homo Sapiens
  misc_feature (1)..(1): n is a, c, g, or t
  misc_feature (5)..(5): n is a, c, g, or t
  misc_feature (952)..(952): n is a, c, g, or t
  misc_feature (971)..(971): n is a, c, g, or t
  misc_feature (1012)..(1012): n is a, c, g, or t
  misc_feature (1020)..(1020): n is a, c, g, or t
  misc_feature (1032)..(1032): n is a, c, g, or t
  misc_feature (1034)..(1034): n is a, c, g, or t
  misc_feature (1039)..(1039): n is a, c, g, or t
  misc_feature (1043)..(1043): n is a, c, g, or t
  misc_feature (1056)..(1056): n is a, c, g, or t
  misc_feature (1061)..(1061): n is a, c, g, or t
  misc_feature (1071)..(1071): n is a, c, g, or t
  misc_feature (1075)..(1075): n is a, c, g, or t
  misc_feature (1093)..(1093): n is a, c, g, or t
  misc_feature (1100)..(1100): n is a, c, g, or t
  misc_feature (1102)..(1102): n is a, c, g, or t
  misc_feature (1104)..(1104): n is a, c, g, or t
  misc_feature (1106)..(1106): n is a, c, g, or t
  misc_feature (1110)..(1111): n is a, c, g, or t
  misc_feature (1127)..(1127): n is a, c, g, or t
  misc_feature (1129)..(1130): n is a, c, g, or t
  misc_feature (1133)..(1133): n is a, c, g, or t
  misc_feature (1148)..(1148): n is a, c, g, or t
  misc_feature (1160)..(1160): n is a, c, g, or t
  misc_feature (1178)..(1178): n is a, c, g, or t
naatngagaaattactatgagaggatcgcatcaccatcaccatcacggatcctatttaggtgacactatagaatcgtcgacccacgcgtccgtccacttcctgctgctactggcagaccgggtggaggcagtgtgcacactgaccgggcaggtggtgctgcgggatcacttcctggagaaatttgggccgctgaagcacatggtgaaggactcctccacaggccagctgtgggcctacactgagcgggctgtcttccgctaccacgtgcaacgggaggcccgagatgtctggcgcacctatctggacatgaaccgcttcgatctggccaaagagtattgtcgagagcggcccgactgcctggacacggtcctggcccgggaggccgatttctgctttcgccagcgtcgctacctggagagcgcacgctgctatgccctgacccagagctactttgaggagattgccctcaagttcctggaggcccgacaggaggaggctctggctgagttcctgcagcgaaaactggccagtttgaagccagccgaacgtacccaggccacactgctgaccacctggctgacagagctctacctgagccggcttggggctctgcagggcgacccagaggccctgactctctaccgagaaaccaaggaatgctttcgaaccttcctcagcagcccccgccacaaagagtggctctttgccagccgggcctctatccatgagctgctcgccagtcatggggacacagaacacatggtgtactttgcagtgatcatgcaggactatgagcgggtggtggcttaccactgtcagcacgaggcctacgaggaggccctggccgtgctcgcccgccaccgtgaccccccagctcttctacaagttctcacccatcctcatccgtcacatcccccgccagcttgtaaatgcctggattgaaatgggcanccggctggatgctcgtcanctcattcctggccctggtgaactaaagccaggggtggtganggtccacnaggtgaaccagncnatccnctanatggaattctgcntgaanctgctggggnaaantgaacaggcatccaaaantacctgntntncntgtnngcccgtggccggccgnannccntattggcctattggnaaaaggttgggnccaccccccccgggggant

SEQ ID NO: 118 - DNA, 1160 bp, Homo Sapiens
  misc_feature (1)..(1): n is a, c, g, or t
  misc_feature (890)..(890): n is a, c, g, or t
  misc_feature (907)..(907): n is a, c, g, or t
  misc_feature (914)..(914): n is a, c, g, or t
  misc_feature (918)..(918): n is a, c, g, or t
  misc_feature (939)..(939): n is a, c, g, or t
  misc_feature (969)..(969): n is a, c, g, or t
  misc_feature (990)..(990): n is a, c, g, or t
  misc_feature (999)..(999): n is a, c, g, or t
  misc_feature (1017)..(1017): n is a, c, g, or t
  misc_feature (1030)..(1030): n is a, c, g, or t
  misc_feature (1045)..(1045): n is a, c, g, or t
  misc_feature (1053)..(1053): n is a, c, g, or t
  misc_feature (1064)..(1064): n is a, c, g, or t
  misc_feature (1068)..(1068): n is a, c, g, or t
  misc_feature (1073)..(1073): n is a, c, g, or t
  misc_feature (1084)..(1084): n is a, c, g, or t
  misc_feature (1099)..(1099): n is a, c, g, or t
  misc_feature (1103)..(1103): n is a, c, g, or t
  misc_feature (1105)..(1105): n is a, c, g, or t
  misc_feature (1111)..(1111): n is a, c, g, or t
  misc_feature (1121)..(1121): n is a, c, g, or t
  misc_feature (1123)..(1123): n is a, c, g, or t
  misc_feature (1132)..(1132): n is a, c, g, or t
  misc_feature (1146)..(1146): n is a, c, g, or t
  misc_feature (1148)..(1148): n is a, c, g, or t
  misc_feature (1154)..(1154): n is a, c, g, or t
  misc_feature (1159)..(1160): n is a, c, g, or t
naatagagaaattactatgagaggatcgcatcaccatcaccatcacggatcctatttaggtgacactatagaatcgtcgacccacgcgtccgggctgaactcttcagccagggtccacgtccagctgccattgccgttgcaggcttctccaactggacctcaaatttcattgtgggcatgtgcttccagtatgtggagcaactgtgtggtccctacgtcttcatcatcttcactgtgctcctggttctgttcttcatcttcacctacttcaaagttcctgagactaaaggccggaccttcgatgagatcgcttccggcttccggcaggggggagccagccaaagtgacaagacacccgaggagctgttccatcccctgggggctgattcccaagtgtgagtcgccccagatcaccagcccggcctgctcccagcagccctaaggatctctcaggagcacaggcagctggatgagacttccaaacctgacagatgtcagccgagccgggcctggggctcctttctccagccagcaatgatgtccagaagaatattcaggacttaacggctccaggattttaacaaaagcaagactgttgctcaaatctattcagacaagcaacaggttttataatttttttattactgattttgttatttttatatcagcctgagtctcctgtgcccacatcccaggcttcaccctgaatggttccatgcctgagggtggagactaagccctgtcgagacacttgccttcttcacccagctaatctgtagggctggacctatgtcctaaggacacactaatcgaactatgaactacaaagcttctatcccaggaggtggctatggccaccccttctgctggcctggatctccccactctangggtcaggctccattangatttgncccnttccatctcttcctacccaancactcaattaatctttctttactgaaacanttggaacactggaatgcaggnagaaaaggnaaggccatctgggctgcnggttcaaatcccnttgcctgagggccanctattacntgaaaaaaggnctgnggganctgcaaactcntgctcaaaaaaatgnaacncngcccgnttggtaaaangnaaaaaattnaaaaaattttgggngncaaaanaaaann

SEQ ID NO: 119 - DNA, 1179 bp, Homo Sapiens
  misc_feature (2)..(2): n is a, c, g, or t
  misc_feature (272)..(272): n is a, c, g, or t
  misc_feature (960)..(960): n is a, c, g, or t
  misc_feature (969)..(969): n is a, c, g, or t
  misc_feature (983)..(983): n is a, c, g, or t
  misc_feature (1001)..(1001): n is a, c, g, or t
  misc_feature (1003)..(1003): n is a, c, g, or t
  misc_feature (1011)..(1011): n is a, c, g, or t
  misc_feature (1028)..(1028): n is a, c, g, or t
  misc_feature (1030)..(1030): n is a, c, g, or t
  misc_feature (1033)..(1033): n is a, c, g, or t
  misc_feature (1051)..(1051): n is a, c, g, or t
  misc_feature (1053)..(1053): n is a, c, g, or t
  misc_feature (1068)..(1068): n is a, c, g, or t
  misc_feature (1078)..(1078): n is a, c, g, or t
  misc_feature (1083)..(1083): n is a, c, g, or t
  misc_feature (1093)..(1093): n is a, c, g, or t
  misc_feature (1097)..(1097): n is a, c, g, or t
  misc_feature (1112)..(1112): n is a, c, g, or t
  misc_feature (1129)..(1129): n is a, c, g, or t
  misc_feature (1136)..(1136): n is a, c, g, or t
  misc_feature (1143)..(1143): n is a, c, g, or t
  misc_feature (1149)..(1149): n is a, c, g, or t
  misc_feature (1153)..(1153): n is a, c, g, or t
  misc_feature (1155)..(1155): n is a, c, g, or t
  misc_feature (1160)..(1161): n is a, c, g, or t
  misc_feature (1166)..(1166): n is a, c, g, or t
  misc_feature (1168)..(1168): n is a, c, g, or t
  misc_feature (1176)..(1176): n is a, c, g, or t
gnattagagagattactatggagaggatcgcatcaccatcaccatcacggatcctatttaggtgacactatagaatcgtcgacccacgcgtccgaaaaaataaccgtccgcgacgccgagacaaaccggacccgcaaccaccatgaacagcaaaggtcaatatccaacacagccaacctaccctgtgcagcctcctgggaatccagtataccctcagaccttgcatcttcctcaggctccaccctataccgatgctccacctgcctactcanagctctatcgtccgagctttgtgcacccaggggctgccacagtccccaccatgtcagccgcatttcctggagcctctctgtatcttcccatggcccagtctgtggctgttgggcctttaggttccacaatccccatggcttattatccagtcggtcccatctatccacctggctccacagtgctggtggaaggagggtatgatgcaggtgccagatttggagctggggctactgctggcaacattcctcctccacctcctggatgccctcccaatgctgctcagcttgcagtcatgcagggagccaacgtcctcgtaactcagcggaaggggaacttcttcatgggtggttcagatggtggctacaccatctggtgaggaaccaaggccacctttgtgccgggaaagacatcacataccttcagcacttctcacaatgtaactgctttagtcatattaacctgaagttgcagtttagacacatgttgttggggtgtctttctggtgcccaaactttcaggcacttttcaaatttaataaggaaccatgtaatggtagcagtacctccctaaagcattttgaggtaggggaggtatccattcataaaatgaatgtgggtgaagccgccctaaggattttcctttaatttctctggagtaatactgtaccatactggtctttgcttttantaataaaanatcaaattaggttnggagggaactttgatttncntaaaaatnaaagttgccaaattatncngantgggctttaatccccttnantctttgaaaaaatanttgtaaaaangggangcataattgncgcnttttcttttcatccntggccaccatccaattncaaaccnaattttnatttcncccncngtctnnttgantnaggggggngga

SEQ ID NO: 120 - DNA, 1154 bp, Homo Sapiens
  misc_feature (10)..(10): n is a, c, g, or t
  misc_feature (786)..(786): n is a, c, g, or t
  misc_feature (801)..(801): n is a, c, g, or t
  misc_feature (828)..(828): n is a, c, g, or t
  misc_feature (852)..(852): n is a, c, g, or t
  misc_feature (871)..(871): n is a, c, g, or t
  misc_feature (873)..(873): n is a, c, g, or t
  misc_feature (881)..(881): n is a, c, g, or t
  misc_feature (887)..(887): n is a, c, g, or t
  misc_feature (890)..(890): n is a, c, g, or t
  misc_feature (930)..(930): n is a, c, g, or t
  misc_feature (938)..(938): n is a, c, g, or t
  misc_feature (968)..(968): n is a, c, g, or t
  misc_feature (973)..(973): n is a, c, g, or t
  misc_feature (992)..(993): n is a, c, g, or t
  misc_feature (996)..(996): n is a, c, g, or t
  misc_feature (1009)..(1009): n is a, c, g, or t
  misc_feature (1012)..(1012): n is a, c, g, or t
  misc_feature (1015)..(1015): n is a, c, g, or t
  misc_feature (1018)..(1018): n is a, c, g, or t
  misc_feature (1033)..(1033): n is a, c, g, or t
  misc_feature (1035)..(1035): n is a, c, g, or t
  misc_feature (1037)..(1037): n is a, c, g, or t
  misc_feature (1040)..(1040): n is a, c, g, or t
  misc_feature (1048)..(1048): n is a, c, g, or t
  misc_feature (1066)..(1066): n is a, c, g, or t
  misc_feature (1081)..(1082): n is a, c, g, or t
  misc_feature (1084)..(1085): n is a, c, g, or t
  misc_feature (1097)..(1097): n is a, c, g, or t
  misc_feature (1105)..(1105): n is a, c, g, or t
  misc_feature (1113)..(1113): n is a, c, g, or t
  misc_feature (1116)..(1116): n is a, c, g, or t
  misc_feature (1122)..(1122): n is a, c, g, or t
  misc_feature (1130)..(1131): n is a, c, g, or t
  misc_feature (1133)..(1133): n is a, c, g, or t
  misc_feature (1138)..(1138): n is a, c, g, or t
  misc_feature (1145)..(1145): n is a, c, g, or t
  misc_feature (1151)..(1151): n is a, c, g, or t
agaaattacnatgagaggatcgcatcaccatcaccatcacggatcctatttaggtgacactatagaatcgtcgacccacgcgtccgggctggctgcctgtgcccgcgagtgtgtggagtccctgcaccagaactcacggacgcggctgctctatggcaagaaccacgtgctggtgcagccgaaggaggatatggaggcggtccctggctacctctccctgcaccagtctgcagagagcctgactctgaagtggacccccaaccagctcatgaatgggactctgggggactccgagctggaaaagagcgtttactgggactatgccctcgtggtgcccttcagccaggtcgtgtgcatccactgccaccagcaaaagagcggtggcacgcttgtgctggtgagccaggatggcatccagaggccgccgctgcatttcccacagggaggacacctgctgtcctttctgtcctgtctggagaatgggctgctgcctcggggacagctagagcccccgctgtggacccagcaagggaaggggaaagtgttccccaagctacggaaacgaagcagcattcgctccgtggatatggaggagatgggcacggggcgggccaccgactatgtgttccggatcatctaccccggccacaggcacgagcacaacgctggtgacatgatcgagatgcagggctttgggcccagcctgccagcctggcacctggagcccctgtgcagtcagggctcctcctgcctctcctgctcctccagcagctccccacatgcaanccccagccactgtanctgcatccccgaccggttgccgctcangctactgtgtgaaaatatgaaaangcaaatcgtgtccccgggncntttacggntgggtnggnacactgccgccacctgtccacggtgcggaaccacccctcngcgctggngcaccataacgtttttccccctgaaccggnccccngggggcctccccgggcttnnccnaggacgtgtggancangtntcnaaaggacaaaaaaantncnaanaactgganctgctgcggcaagtttantacggaggcataaannannaaatccccaagnagtttggncctttttnttnggcccnaaaaattnngnatgancaaaaanaaatgnaac

SEQ ID NO: 121 - DNA, 1173 bp, Homo Sapiens
  misc_feature (2)..(2): n is a, c, g, or t
  misc_feature (4)..(10): n is a, c, g, or t
  misc_feature (12)..(12): n is a, c, g, or t
  misc_feature (15)..(15): n is a, c, g, or t
  misc_feature (835)..(835): n is a, c, g, or t
  misc_feature (838)..(838): n is a, c, g, or t
  misc_feature (845)..(845): n is a, c, g, or t
  misc_feature (859)..(859): n is a, c, g, or t
  misc_feature (883)..(883): n is a, c, g, or t
  misc_feature (890)..(890): n is a, c, g, or t
  misc_feature (905)..(905): n is a, c, g, or t
  misc_feature (954)..(954): n is a, c, g, or t
  misc_feature (977)..(977): n is a, c, g, or t
  misc_feature (986)..(986): n is a, c, g, or t
  misc_feature (1004)..(1004): n is a, c, g, or t
  misc_feature (1007)..(1007): n is a, c, g, or t
  misc_feature (1030)..(1030): n is a, c, g, or t
  misc_feature (1032)..(1032): n is a, c, g, or t
  misc_feature (1051)..(1051): n is a, c, g, or t
  misc_feature (1055)..(1055): n is a, c, g, or t
  misc_feature (1069)..(1069): n is a, c, g, or t
  misc_feature (1077)..(1077): n is a, c, g, or t
  misc_feature (1085)..(1085): n is a, c, g, or t
  misc_feature (1102)..(1102): n is a, c, g, or t
  misc_feature (1105)..(1105): n is a, c, g, or t
  misc_feature (1107)..(1107): n is a, c, g, or t
  misc_feature (1112)..(1112): n is a, c, g, or t
  misc_feature (1115)..(1115): n is a, c, g, or t
  misc_feature (1117)..(1117): n is a, c, g, or t
  misc_feature (1127)..(1127): n is a, c, g, or t
  misc_feature (1134)..(1134): n is a, c, g, or t
  misc_feature (1136)..(1136): n is a, c, g, or t
  misc_feature (1139)..(1139): n is a, c, g, or t
  misc_feature (1146)..(1146): n is a, c, g, or t
  misc_feature (1155)..(1156): n is a, c, g, or t
  misc_feature (1158)..(1159): n is a, c, g, or t
  misc_feature (1166)..(1166): n is a, c, g, or t
  misc_feature (1169)..(1169): n is a, c, g, or t
tntnnnnnnngnatnagaggaaattactatgagaggatcgcatcaccatcaccatcacggatcctatttaggtgacactatagaatcgtcgacccacgcgatccgaaattggtctgctgtctgaagaggtagaattatatggtgaaacaaaggccaaagttctgctgtcagcactagaacgcctgaagcaccggcctgatgggaaatacgtggtggtgactggaataactccaacacccctgggagaagggaaaagcacaactacaatcgggctagtgcaagcccttggtgcccatctctaccagaatgtctttgcgtgtgtgcgacagccttctcagggccccacctttggaataaaaggtggcgctgcaggaggcggctactcccaggtcattcctatggaagagtttaatctccacctcacaggtgacatccatgccatcactgcagctaataacctcgttgctgcggccattgatgctcggatatttcatgaactgacccagacagacaaggctctctttaatcgtttggtgccatcagtaaatggagtgagaaggttctctgacatccaaatccgaaggttaaagagactaggcattgaaaagactgaccctaccacactgacagatgaagagataaacagatttgcaagattggacattgatccagaaaccataacttggcaaagagtgttggataccaatgatagattcctgaggaagatcacgattggacaggctccaacggagaagggtcacacacggacggcccagtttgatatctctgtggccagtgaaaattatggctgtcctggctctcaccacttctctanaanacatganaaagagactgggcnaaaatggtggtggcatccagtaanaaagganagcccgtcagtgccnaaaatctggggggtgagtggtgcactgacagtgcttatgaaggaacgcnaatcaagccccaatctcatgcanaaactggangggcactccagtgtttgnccntgctggcccgtttgccaacatcncncatgggaattcctccaccnttgnaaaccaaaatcccnctccaacnttgttggncccaaaagggtttgtantgncngaaanccngnatttggaacnaaaattngnaanggaaaanttttttaanntnnaaaggcnggnattc

SEQ ID NO: 122 - DNA, 1264 bp, Homo Sapiens
  misc_feature (896)..(896): n is a, c, g, or t
  misc_feature (949)..(950): n is a, c, g, or t
  misc_feature (952)..(952): n is a, c, g, or t
  misc_feature (958)..(958): n is a, c, g, or t
  misc_feature (986)..(986): n is a, c, g, or t
  misc_feature (994)..(994): n is a, c, g, or t
  misc_feature (999)..(999): n is a, c, g, or t
  misc_feature (1020)..(1021): n is a, c, g, or t
  misc_feature (1032)..(1032): n is a, c, g, or t
  misc_feature (1040)..(1040): n is a, c, g, or t
  misc_feature (1047)..(1047): n is a, c, g, or t
  misc_feature (1050)..(1050): n is a, c, g, or t
  misc_feature (1054)..(1054): n is a, c, g, or t
  misc_feature (1057)..(1057): n is a, c, g, or t
  misc_feature (1059)..(1059): n is a, c, g, or t
  misc_feature (1074)..(1074): n is a, c, g, or t
  misc_feature (1087)..(1088): n is a, c, g, or t
  misc_feature (1107)..(1107): n is a, c, g, or t
  misc_feature (1112)..(1112): n is a, c, g, or t
  misc_feature (1115)..(1115): n is a, c, g, or t
  misc_feature (1117)..(1117): n is a, c, g, or t
  misc_feature (1120)..(1120): n is a, c, g, or t
  misc_feature (1136)..(1136): n is a, c, g, or t
  misc_feature (1155)..(1155): n is a, c, g, or t
  misc_feature (1170)..(1170): n is a, c, g, or t
  misc_feature (1181)..(1181): n is a, c, g, or t
  misc_feature (1183)..(1183): n is a, c, g, or t
  misc_feature (1194)..(1194): n is a, c, g, or t
  misc_feature (1196)..(1196): n is a, c, g, or t
  misc_feature (1199)..(1199): n is a, c, g, or t
  misc_feature (1201)..(1201): n is a, c, g, or t
  misc_feature (1228)..(1228): n is a, c, g, or t
  misc_feature (1240)..(1240): n is a, c, g, or t
  misc_feature (1253)..(1254): n is a, c, g, or t
  misc_feature (1256)..(1256): n is a, c, g, or t
  misc_feature (1262)..(1262): n is a, c, g, or t
tagagaaattactatgagaggatcgcatcaccatcaccatcacggatcctatttaggtgacactatagaatcgtcgacccacgcgtccgcagaagtccagtcagattggaagttctcagctgctgaagagacatgtgcagcggacagaagctgtgctgacccacaaacaagctcaagcacagtttgctgcttttctgaaacaaaatatgctggtgaggaaagctcttcctcctggcacctcctcctgtctctttgttcccatttcatcagaaccaccagaggaaggagagaaagaggatcttagggttcagctgaagcgacaccatccctcgagtccccttcctggcagtaagacctccaaacgaccgaagatcaaggtgtcccttatctcccaaggggacacagctggagggccttgtgctccttcccaaggaagtgctccagaagctgcaggtgggaagcccatcaccatgacactggggcaggcttcagcaggggccaaggagctcacaggacttctcaccacagccaagtccagttcttctgaaggtggagtctcagccagcccagtcccttcagtggtctccagcagcactgcacccagtgccttgcacacactgcagagccgcctggtggccacatctcctggcagctccctcccaggggccacatcagccagcagcctcctccaaggcctcagcttcagcttgcaggatatcagcagcaagacctctggccttccagcaaatccctccccaggaccagccccacaggccaccagtgtgaagttgcccacccccatgcagagcctgggtgccatcaccacgggcaccagcaccattgtccgtaccattcctgtggccaccactctctcctccttgggtgccactcctggngggaagccccacagccatccaccagctgctgaaccaatgggggcctcgctaanntnggcaangcagcctcccctggcctgggctcaaatntctaaacnaagcnatcaggcttggaaggtccccnnccaccatttanttctgganacttcgnggncaanccnancaagaatcacttaanactgaacccctanngggctcaggaacaaccccnatccnaananatncctctttcccaggggnttgccctccaaatttaaangggcctggcttccanaacctgaaaangntgggggaaatntnccncnttaccaagttggggaagggctccccanggggggccccgnaaaaggggggggnncngctaantt

SEQ ID NO: 123 - DNA, 1080 bp, Homo Sapiens
  misc_feature (709)..(709): n is a, c, g, or t
  misc_feature (820)..(820): n is a, c, g, or t
  misc_feature (830)..(830): n is a, c, g, or t
  misc_feature (851)..(851): n is a, c, g, or t
  misc_feature (866)..(866): n is a, c, g, or t
  misc_feature (886)..(886): n is a, c, g, or t
  misc_feature (898)..(899): n is a, c, g, or t
  misc_feature (901)..(901): n is a, c, g, or t
  misc_feature (924)..(925): n is a, c, g, or t
  misc_feature (930)..(930): n is a, c, g, or t
  misc_feature (943)..(943): n is a, c, g, or t
  misc_feature (966)..(966): n is a, c, g, or t
  misc_feature (1001)..(1001): n is a, c, g, or t
  misc_feature (1006)..(1007): n is a, c, g, or t
  misc_feature (1013)..(1013): n is a, c, g, or t
  misc_feature (1026)..(1026): n is a, c, g, or t
  misc_feature (1033)..(1033): n is a, c, g, or t
  misc_feature (1046)..(1047): n is a, c, g, or t
  misc_feature (1049)..(1049): n is a, c, g, or t
  misc_feature (1052)..(1052): n is a, c, g, or t
  misc_feature (1062)..(1080): n is a, c, g, or t
tagagaaattactatgagaggatcgcatcaccatcaccatcacggatcctatttaggtgacactatagaatcgtcgacccacgcgtccgggtccatcctggctcaacagagcaagctgtccaagcccagggtgaccttctctgaggagtctgcagttcctgagaggagctggcgcctcaggccatacctgggctatgactggattgcagggtctctggacaccagctcttccatcaccagccagcctgaggccttcttctccaagctgcaggagtttcgggaaaccaacaaggaggagtgtatctgcagccatcctgaacctcagttgccaggcctgcgtgagagcagtggcagcggcgtggaggaagaccatgaatgcgtgtactgttaccgtgtcaaccggcgcctgttcccggtgcctgtggatcccggtaccccctgccgcctgtgcaggacaccgcgagaccagcagggccctgggaccctggcgcagccagcgcacgtcagggtgagcatcccgctgtcgatcctggagcccccgcaccggtaccacatccaccggcgaaagagctttgacgcctctgacacactggccctgccccggcactgcctgctgggctgggacatttttcctccgaagtctgagaaaagctcagcccccaggaacctggacctctggtcctctgtctccgctgaggcccagcaccanaagctgtccggcaccagcagcccttttcacccggcctcaccaatgcagatgctgcccccgaccccgacctggtcagtgccccaggtccctcggccccacgtcccacggcanaagccctgangactgactcctgggggagaanagcattcccgccgcntccagcctctcccttctggnaggcgcacccannanatggaatcccctgcccgcccaanntcagnccactgtcctagnttgggcaggtgggtggacccaancttgtctgctgcctgaattccaaaaaggaagaccntgggnngaaggngaggaatttgtgnaatttgnaaaaaaaactcanngnttngcaaaaaaannnnnnnnnnnnnnnnnnn

SEQ ID NO: 124 - DNA, 734 bp, Homo Sapiens
  misc_feature (707)..(708): n is a, c, g, or t
  misc_feature (710)..(710): n is a, c, g, or t
  misc_feature (713)..(713): n is a, c, g, or t
  misc_feature (715)..(721): n is a, c, g, or t
  misc_feature (723)..(734): n is a, c, g, or t
tagagaaattactatgagaggatcgcatcaccatcaccatcacggatcctatttaggtgacactatagaatcgtcgacccacgcgtccgccctggcgtcgcgtaggagggaggatggagagcggcgacgaagcggccatcgagaggcaccgcgtccacttgcgctccgccacattgcgcgacgccgtacccgccacactgcatctgctgccctgcgaggttgcggtggacgggcccgccccggtggggcgcttcttcacgcccgccatccgccagggccccgagggactcgaagtgtcgtttcggggccgctgtctacggggagaggaggtggcggtgccgcctggcctcgtgggatacgtgatggtgacagaagagaagaaggtgtcgatggggaagccagaccccttgcgggattccgggactgacgaccaagaggaggagccgctggagcgggacttcgaccgcttcattggagccactgccaacttcagccgcttcaccctgtggggtctggagaccatccctggcccggatgccaaagtgcgtggggccttaacttggcccagccttgcggcagcgattcacgcacaggtgcccgaggactgagaaccagagcttgaaattcaaagctgcgatcccttcacagcagtaaaccagctctttggaaccgattccatcaccccaataaaggagctcttcacagcnnanaanannnnnnnannnnnnnnnnnn

SEQ ID NO: 125 - DNA, 1165 bp, Homo Sapiens
  misc_feature (965)..(965): n is a, c, g, or t
  misc_feature (972)..(972): n is a, c, g, or t
  misc_feature (984)..(984): n is a, c, g, or t
  misc_feature (1003)..(1003): n is a, c, g, or t
  misc_feature (1019)..(1023): n is a, c, g, or t
  misc_feature (1025)..(1025): n is a, c, g, or t
  misc_feature (1041)..(1041): n is a, c, g, or t
  misc_feature (1061)..(1061): n is a, c, g, or t
  misc_feature (1070)..(1070): n is a, c, g, or t
  misc_feature (1072)..(1072): n is a, c, g, or t
  misc_feature (1077)..(1077): n is a, c, g, or t
  misc_feature (1080)..(1080): n is a, c, g, or t
  misc_feature (1106)..(1106): n is a, c, g, or t
  misc_feature (1114)..(1114): n is a, c, g, or t
  misc_feature (1120)..(1120): n is a, c, g, or t
  misc_feature (1122)..(1122): n is a, c, g, or t
  misc_feature (1128)..(1128): n is a, c, g, or t
  misc_feature (1130)..(1130): n is a, c, g, or t
  misc_feature (1136)..(1136): n is a, c, g, or t
  misc_feature (1143)..(1143): n is a, c, g, or t
  misc_feature (1163)..(1163): n is a, c, g, or t
tagagaaattactatgagaggatcgcatcaccatcaccatcacggatcctatttaggtgacactatagaatcgtcgacccacgcgtccgacaacgtgggactctgcatttgtctgtttgatatcaccaaactggaggatgcctatgtattccctggggatggcgcatcacacaccaaagtccattttcgctgcgtggtgtttcatccattcctagatgagattctcattgggaagatcaaaggctgcagcccagaaggagtgcacggtaacagtggccctgacgcctcagacaagacttgggaacactgtgggggcaggagtctctctaggcttcttcgatgacattctcatccccccagagtcactgcagcagccagccaagttcgacgaagcggagcaggtgtgggtgtgggagtacgagacggaggaaggagcacacgacctctacatggacaccggcgaggagatccgcttccgggtggtggacgagagctttgttgacacgtcccccacagggcccagctcagcagatgccaccacttccagtgaggagctgccaaagaaggaggctccgtacacgcttgtgggatccatcagtgagccaggcctgggccttctctcctggtggaccagcaactagccctggggctggacagtggaccctaccagcctgcgggaaggtggtatggccggctgtgaagacaacagcagctgaggccgatgctaaggagatagtgtctcgagctggacagtgaggcaaggccaggagtgcccaccagcttgccccgctcctccaccatctaggccctgctcctccttcactgcagtgatggatccatctgtggctgtggctgttgggcctccactgaccttgactgaaaagacccttcctggacctggacttgacaacaaacggcacagacaccaatcactcacagaacagtcactggttttggattcttgntttcctngcaaaaaaaaangttctctaaaaatccttcnccccccaatgaaatgnnnnngncgggaaaaaaactttnaaaggggagtcttgtcctcnaaaaaaaananagttngcntggggctgcttaaaatttgaacccanctccaaanaggaanangggggncnaaaaanttttttnaaaaaccccccccccaaccnaa

SEQ ID NO: 126 - DNA, 1171 bp, Homo Sapiens
  misc_feature (1)..(1): n is a, c, g, or t
  misc_feature (906)..(906): n is a, c, g, or t
  misc_feature (936)..(936): n is a, c, g, or t
  misc_feature (955)..(955): n is a, c, g, or t
  misc_feature (964)..(964): n is a, c, g, or t
  misc_feature (972)..(972): n is a, c, g, or t
  misc_feature (978)..(978): n is a, c, g, or t
  misc_feature (985)..(985): n is a, c, g, or t
  misc_feature (987)..(987): n is a, c, g, or t
  misc_feature (1014)..(1014): n is a, c, g, or t
  misc_feature (1025)..(1025): n is a, c, g, or t
  misc_feature (1031)..(1031): n is a, c, g, or t
  misc_feature (1034)..(1034): n is a, c, g, or t
  misc_feature (1037)..(1037): n is a, c, g, or t
  misc_feature (1046)..(1046): n is a, c, g, or t
  misc_feature (1053)..(1053): n is a, c, g, or t
  misc_feature (1055)..(1055): n is a, c, g, or t
  misc_feature (1061)..(1061): n is a, c, g, or t
  misc_feature (1065)..(1065): n is a, c, g, or t
  misc_feature (1067)..(1067): n is a, c, g, or t
  misc_feature (1076)..(1077): n is a, c, g, or t
  misc_feature (1090)..(1090): n is a, c, g, or t
  misc_feature (1093)..(1093): n is a, c, g, or t
  misc_feature (1103)..(1103): n is a, c, g, or t
  misc_feature (1105)..(1106): n is a, c, g, or t
  misc_feature (1131)..(1131): n is a, c, g, or t
  misc_feature (1136)..(1136): n is a, c, g, or t
  misc_feature (1139)..(1139): n is a, c, g, or t
  misc_feature (1141)..(1141): n is a, c, g, or t
  misc_feature (1164)..(1164): n is a, c, g, or t
  misc_feature (1171)..(1171): n is a, c, g, or t
naattagagaaattactatgagaggatcgcatcaccatcaccatcacggatcctatttaggtgacactatagaatcgtcgacccacgcgtccgcggacgcgtgggttctggcgaccgtccccacccgggctcgcgtctccgtttctccgagaggcccaaggtgtctccgccgcagcctctgtcgcgccgtgacctgtacaggtcgcgggagtcgtagggaggacgccgggacacctggaagccgagaaatggattcagtggcctttgaggatgtggctgtgaacttcaccctggaggagtgggctttgctggatccttcccagaagaatctctacagggatgtgatgcgggaaaccttcaggaacctggcttctgtaggaaaacaatgggaagaccagaacattgaagacccattcaaaattcccaggagaaatataagtcatattccagagagactctgtgaaagtaaagaaggtggtcaaggtgaagaaaccttcagccagattccagatggtattctgaacaagaaaactcctggagtaaaaccgtgtgaaagcagtgtgtgtggagaagttggcatgggtccttcatcacttaataggcacatcagagatcacactggacgtgaaccaaatgaatatcaggaatatggaaagaagtcatatacacgtaaccagtgtggacgagccttgagttatcatcgctcttttccagtacgtgaaaggactcatcctggaggaaagccctatgattgtaaggaatgtggagaaacctttatttctcttgtaagcattcgaagacacatgttaacgcataggggaggtgtaccttacaaatgtaaggtgtgtgggaaagcctttgattatcccagtttatttcgtatacatgaaagaagtcacactgganaaaaaccttatgaatgcaagcaatgtgggnaaagccttcagttgttccngttacattnaaaatacntgaaanggactcncnctggaaaataaaccctatgaatgcaanccagtgggggnaaaacnttncanttgttccangtacatncnaatccntgancnaactccccnnggaaaaaaacccnacnaatgtaaaangnnggggtaaagcctttagggggccccnttttnttncnaatccccaaaagacccccccggnaaaaaan

SEQ ID NO: 127 - DNA, 1179 bp, Homo Sapiens
  misc_feature (816)..(816): n is a, c, g, or t
  misc_feature (819)..(819): n is a, c, g, or t
  misc_feature (863)..(863): n is a, c, g, or t
  misc_feature (878)..(878): n is a, c, g, or t
  misc_feature (896)..(896): n is a, c, g, or t
  misc_feature (914)..(914): n is a, c, g, or t
  misc_feature (916)..(916): n is a, c, g, or t
  misc_feature (921)..(921): n is a, c, g, or t
  misc_feature (927)..(927): n is a, c, g, or t
  misc_feature (930)..(930): n is a, c, g, or t
  misc_feature (941)..(941): n is a, c, g, or t
  misc_feature (948)..(948): n is a, c, g, or t
  misc_feature (951)..(951): n is a, c, g, or t
  misc_feature (956)..(956): n is a, c, g, or t
  misc_feature (959)..(959): n is a, c, g, or t
  misc_feature (975)..(975): n is a, c, g, or t
  misc_feature (980)..(980): n is a, c, g, or t
  misc_feature (987)..(988): n is a, c, g, or t
  misc_feature (1027)..(1027): n is a, c, g, or t
  misc_feature (1032)..(1032): n is a, c, g, or t
  misc_feature (1037)..(1037): n is a, c, g, or t
  misc_feature (1039)..(1039): n is a, c, g, or t
  misc_feature (1045)..(1045): n is a, c, g, or t
  misc_feature (1051)..(1051): n is a, c, g, or t
  misc_feature (1053)..(1053): n is a, c, g, or t
  misc_feature (1063)..(1063): n is a, c, g, or t
  misc_feature (1073)..(1073): n is a, c, g, or t
  misc_feature (1079)..(1079): n is a, c, g, or t
  misc_feature (1108)..(1108): n is a, c, g, or t
  misc_feature (1113)..(1113): n is a, c, g, or t
  misc_feature (1117)..(1117): n is a, c, g, or t
  misc_feature (1128)..(1128): n is a, c, g, or t
  misc_feature (1148)..(1149): n is a, c, g, or t
  misc_feature (1155)..(1155): n is a, c, g, or t
  misc_feature (1162)..(1162): n is a, c, g, or t
  misc_feature (1166)..(1166): n is a, c, g, or t
  misc_feature (1169)..(1170): n is a, c, g, or t
tagagaaaattactatgagaggatcgcatcaccatcaccatcacggatcctatttaggtgacactatagaatcgtcgacccacgcgtccgggaaagtgggcggcggagccagggtccctggaatggcggagactctgtcaggcctaggtgattctggagcggcgggcgcggcggctctgagctccgcctcgtcagagaccgggacgcggcgcctcagcgacctgcgagtgatcgatctgcgggcggagctgaggaaacggaatgtggactcgagcggcaacaagagcgttttgatggagcggctgaagaaggcaattgaagatgaaggtggtaatcctgacgaaattgaaattacctccgagggaaacaagaaaacatcaaagaggtctagcaaagggcgcaaaccagaagaagagggtgtggaagataacgggctggaggaaaactctggggatggacaggaggatgttgagaccagtctggagaacttgcaggacatcgacatcatggatatcagtgtgttggatgaagcagaaattgataatggaagcgttgcagattgtgtcgaagacgatgatgctgataacctccaggagtccctgtcggatagtagagagctagtcgagggggaaatgaaagagcttccggagcagcttcaggaacatgctatagaggacaaagaaactataaacaatttagatacttcatcatctgacttcactatattacaggaaattgaagagccatccctggagccagaaaatgagaaaatactcgacattttgggggaaacttgtaaatctgagccagtaaaanaanaaagttccgagctggaaccagccatttgcacaggacacaagtancgtggggccagacanaaaagcttgcggaggaanaaggacctattttgacancnccccntcccgnaanaaggtgatttnaaatttnggnccacngangtcaacaagccccacncctcnattccanncaaggcaaaaaaccctgtttaaccggtaaattgaaaaanggaanccccncnggaacnaccccngnccaatggccnaaaaagaacngaactnttgaacccctgttaaggccttaaaacccngccantttnaaaccaaaaanaattgccggcccttcccaanncttccngggaagncctnttnnccggaggaa

SEQ ID NO: 128 - DNA, 1135 bp, Homo Sapiens
  misc_feature (3)..(3): n is a, c, g, or t
  misc_feature (865)..(865): n is a, c, g, or t
  misc_feature (922)..(922): n is a, c, g, or t
  misc_feature (952)..(952): n is a, c, g, or t
  misc_feature (958)..(958): n is a, c, g, or t
  misc_feature (966)..(966): n is a, c, g, or t
  misc_feature (968)..(968): n is a, c, g, or t
  misc_feature (973)..(973): n is a, c, g, or t
  misc_feature (994)..(994): n is a, c, g, or t
  misc_feature (997)..(997): n is a, c, g, or t
  misc_feature (1007)..(1007): n is a, c, g, or t
  misc_feature (1021)..(1021): n is a, c, g, or t
  misc_feature (1030)..(1030): n is a, c, g, or t
  misc_feature (1035)..(1035): n is a, c, g, or t
  misc_feature (1038)..(1038): n is a, c, g, or t
  misc_feature (1051)..(1051): n is a, c, g, or t
  misc_feature (1059)..(1059): n is a, c, g, or t
  misc_feature (1061)..(1062): n is a, c, g, or t
  misc_feature (1080)..(1080): n is a, c, g, or t
  misc_feature (1085)..(1085): n is a, c, g, or t
  misc_feature (1090)..(1090): n is a, c, g, or t
  misc_feature (1092)..(1092): n is a, c, g, or t
  misc_feature (1096)..(1096): n is a, c, g, or t
  misc_feature (1098)..(1098): n is a, c, g, or t
  misc_feature (1100)..(1100): n is a, c, g, or t
  misc_feature (1107)..(1107): n is a, c, g, or t
  misc_feature (1117)..(1117): n is a, c, g, or t
  misc_feature (1122)..(1122): n is a, c, g, or t
  misc_feature (1129)..(1130): n is a, c, g, or t
  misc_feature (1132)..(1135): n is a, c, g, or t
aangagaaaattactatgagaggatcgcatcaccatcaccatcacggatcctatttaggtgacactatagaatcgtcgacccacgcgtccggccggtcgttcggacgtcttgcctgtcgctggaggagaggtccgggctctccaggaaggtggctgcggcgacaaaatgaagatattcgtgggcaacgtcgacggggcggatacgactccggaggagctggcagccctctttgcgccctacggcacggtcatgagctgcgccgtcatgaaacagttcgccttcgtgcacatgcgcgagaacgcgggcgcgctgcgcgccatcgaagccctgcacggccacgagctgcggccggggcgcgcgctcgtggtggagatgtcgcgcccaaggcctcttaatacttggaagattttcgtgggcaatgtgtcggctgcatgcacgagccaggaactgcgcagcctcttcgagcgccgcggacgcgtcatcgagtgtgacgtggtgaaagactacgcgtttgttcacatggagaaggaagcagatgccaaagccgcaatcgcgcagctcaacggcaaagaagtgaagggcaagcgcatcaacgtggaactctccaccaagggtcagaagaaggggcctggcctggctgtccagtctggggacaagaccaagaaaccaggggctggggatacggccttccctggaactggtggcttctctgccaccttcgactaccagcaggcttttggcaacagcactggtggctttgatgggcaagcccgtcagcccacaccacccttctttggtcgcgaccgcagccctctgcgccgttcacctccccgagcctcttatgtggctcctctgacggcccanccagctacctaccgggcccagccgtccgtgtcactgggagctgcctacagggcccanccttctgcctctttgggtgttggctatcgnactcancccatganancccangcagcctcttaccgcgctcanccntctgtctccnttggggcaccatanaggggccanctggntantcctaactcccantctgctgnanntttttactcggcccatanggggnaaccnancctnancntcggccnttttctctanggggntaagganntnnnn

SEQ ID NO: 129 - DNA, 1062 bp, Homo Sapiens
  misc_feature (2)..(2): n is a, c, g, or t
  misc_feature (801)..(801): n is a, c, g, or t
  misc_feature (807)..(807): n is a, c, g, or t
  misc_feature (818)..(818): n is a, c, g, or t
  misc_feature (826)..(826): n is a, c, g, or t
  misc_feature (851)..(852): n is a, c, g, or t
  misc_feature (868)..(868): n is a, c, g, or t
  misc_feature (872)..(872): n is a, c, g, or t
  misc_feature (886)..(886): n is a, c, g, or t
  misc_feature (896)..(896): n is a, c, g, or t
  misc_feature (899)..(899): n is a, c, g, or t
  misc_feature (903)..(903): n is a, c, g, or t
  misc_feature (905)..(905): n is a, c, g, or t
  misc_feature (923)..(923): n is a, c, g, or t
  misc_feature (927)..(927): n is a, c, g, or t
  misc_feature (938)..(939): n is a, c, g, or t
  misc_feature (954)..(954): n is a, c, g, or t
  misc_feature (968)..(968): n is a, c, g, or t
  misc_feature (974)..(974): n is a, c, g, or t
  misc_feature (978)..(978): n is a, c, g, or t
  misc_feature (982)..(984): n is a, c, g, or t
  misc_feature (986)..(986): n is a, c, g, or t
  misc_feature (991)..(992): n is a, c, g, or t
  misc_feature (995)..(995): n is a, c, g, or t
  misc_feature (1001)..(1001): n is a, c, g, or t
  misc_feature (1006)..(1006): n is a, c, g, or t
  misc_feature (1017)..(1017): n is a, c, g, or t
  misc_feature (1026)..(1026): n is a, c, g, or t
  misc_feature (1034)..(1034): n is a, c, g, or t
  misc_feature (1036)..(1036): n is a, c, g, or t
  misc_feature (1044)..(1044): n is a, c, g, or t
  misc_feature (1047)..(1048): n is a, c, g, or t
  misc_feature (1058)..(1058): n is a, c, g, or t
cnaatagagagaattactatgagaggatcgcatcaccatcaccatcacggatcctatttaggtgacactatagaatcgtcgacccacgcgtccggctacttcttcttggacgacacggaccctgatagcatgaaggattttgagatcgtggaccagccgggcttggacatctttggacaggttttcaaccagtggaagagcaaggagtgtgtttgccccaattgcagtcgcagcattgccgcctcccgctttgctccccatctggagaagtgcctgggaatgggtcggaacagcagccgaatcgccaaccgccggattgccaatagcaacaatatgaataagtctgagagtgaccaagaagataatgatgacatcaatgacaacgactggtcctatggctcggagaagaaagccaagaagagaaagtcagacaagaaccccaattcccctcgaagatccaagtcattaaaacacaaaaatggggaacttagcaattcggatccttttaagtataacaattcaactgggatcagctatgagaccctggggccggaggagcttcgcagcctgctaaccacgcaatgtggggtgatttctgaacacaccaagaagatgtgcacaaggtccctgcgctgcccacagcacacagatgagcagaggcgaaccgtacggatttattttctcgggccctcggctgtccttccagaagtcgagagctccctggataatgacagctttgacatgactgacagccaggccctgatcagccggcttcagtgggacggctcctctgacctctcnccctcngaatcaggctncctccaanacgagtgaaaatcagggatggggtnnagggtacccacagctntgantcccggaaaccaanaaaaaaaatnccntctnancctggtagggaatgcccnccgnctaagtttcannaaaaaaaaaaaaccnaaagcccccggggncccccnaaancccnnnanttttnnatnaaatcnccttnacttgggggcnaagggaaancctttggntnaaaaaaanccnntttccctgancccc

SEQ ID NO: 130 - DNA, 1179 bp, Homo Sapiens
  misc_feature (1)..(1): n is a, c, g, or t
  misc_feature (17)..(17): n is a, c, g, or t
  misc_feature (869)..(869): n is a, c, g, or t
  misc_feature (886)..(886): n is a, c, g, or t
  misc_feature (910)..(910): n is a, c, g, or t
  misc_feature (981)..(981): n is a, c, g, or t
  misc_feature (983)..(983): n is a, c, g, or t
  misc_feature (998)..(998): n is a, c, g, or t
  misc_feature (1025)..(1025): n is a, c, g, or t
  misc_feature (1064)..(1064): n is a, c, g, or t
  misc_feature (1066)..(1066): n is a, c, g, or t
  misc_feature (1097)..(1097): n is a, c, g, or t
  misc_feature (1101)..(1101): n is a, c, g, or t
  misc_feature (1120)..(1120): n is a, c, g, or t
  misc_feature (1130)..(1130): n is a, c, g, or t
  misc_feature (1136)..(1136): n is a, c, g, or t
  misc_feature (1152)..(1152): n is a, c, g, or t
  misc_feature (1158)..(1158): n is a, c, g, or t
  misc_feature (1166)..(1166): n is a, c, g, or t
naattagaggaaattanctatgagaggatcgcatcaccattcaccatcacggatcctatttaggtgacactatagaatcgtcgacccacgcgtccggtgaacgcgctggctgccggcagcgagaaatgatgaaactgacctgtgaacgctgtagccgaaacttctgcatcaagcaccggcatccactggaccatgattgctctggggaggggcacccaaccagccgggcaggacttgctgccatctccagagcacaagctgtggcttctacaagcactgtccccagcccaagtcaaaccatgccttcctgtacctctcccagcagagccacaacccgatctccgtcctggacagcccctccagtgattgctttgcagaatggcctgagtgaggatgaagctctgcagcgggccctggaaatgtccctggcagaaaccaaaccccaggttccaaggtaccttaccctcttgtgaaagagagcgcaagctgtgggcaagggcttggtctggaggcaggtaggtgggaccactctgacacaatgcaagataatcgctggcaacttggtctcaaaattaagatgaactatatgatctttgacaagttatttaacccatggagccttcatttcctctataaaacggggacaatactaatacccaccttgtagtgttgctatgaagattgagataatcctcagcagtgctcagcaccatgaggcccaacacacacagatcagatgttcaaatttcagatcttaccatcatccaacttaaactgtttctccctcccagttgtcaggaggaagaagacctagctttagcacaagcactgtcagccagtgaggcagaataccagcggcagcaggcccnagagccgcagctcgaanccgtccaactgcagcctgtgctanggccctgggcttggggagggaggttcacctgaagaggactgtggccttcacacctctagggtacacagggnanaagaaggcccgggancaccctggagggcaaaaacaaacgggnaatgatgtggaaggtccccctgggaacctctggaaggcntngctaatgctccccctgcatggaaaaaaacgnctancaactgttccctggttggnccccatggangctggncaggcctaatcttaancccctnaaaaaggncacccccttaagc

SEQ ID NO: 131 - DNA, 1343 bp, Homo Sapiens
  misc_feature (948)..(948): n is a, c, g, or t
  misc_feature (1023)..(1023): n is a, c, g, or t
  misc_feature (1031)..(1031): n is a, c, g, or t
  misc_feature (1041)..(1041): n is a, c, g, or t
  misc_feature (1062)..(1062): n is a, c, g, or t
  misc_feature (1076)..(1076): n is a, c, g, or t
  misc_feature (1078)..(1078): n is a, c, g, or t
  misc_feature (1082)..(1082): n is a, c, g, or t
  misc_feature (1088)..(1088): n is a, c, g, or t
  misc_feature (1104)..(1104): n is a, c, g, or t
  misc_feature (1114)..(1115): n is a, c, g, or t
  misc_feature (1130)..(1130): n is a, c, g, or t
  misc_feature (1135)..(1135): n is a, c, g, or t
  misc_feature (1149)..(1149): n is a, c, g, or t
  misc_feature (1166)..(1167): n is a, c, g, or t
  misc_feature (1169)..(1169): n is a, c, g, or t
  misc_feature (1176)..(1176): n is a, c, g, or t
  misc_feature (1191)..(1191): n is a, c, g, or t
  misc_feature (1194)..(1194): n is a, c, g, or t
  misc_feature (1204)..(1205): n is a, c, g, or t
  misc_feature (1213)..(1213): n is a, c, g, or t
  misc_feature (1217)..(1217): n is a, c, g, or t
  misc_feature (1220)..(1220): n is a, c, g, or t
  misc_feature (1226)..(1226): n is a, c, g, or t
  misc_feature (1229)..(1229): n is a, c, g, or t
  misc_feature (1236)..(1236): n is a, c, g, or t
  misc_feature (1241)..(1241): n is a, c, g, or t
  misc_feature (1245)..(1245): n is a, c, g, or t
  misc_feature (1250)..(1250): n is a, c, g, or t
  misc_feature (1272)..(1272): n is a, c, g, or t
  misc_feature (1276)..(1276): n is a, c, g, or t
  misc_feature (1279)..(1281): n is a, c, g, or t
  misc_feature (1287)..(1287): n is a, c, g, or t
  misc_feature (1297)..(1297): n is a, c, g, or t
  misc_feature (1307)..(1307): n is a, c, g, or t
  misc_feature (1320)..(1320): n is a, c, g, or t
  misc_feature (1326)..(1326): n is a, c, g, or t
  misc_feature (1330)..(1330): n is a, c, g, or t
  misc_feature (1334)..(1334): n is a, c, g, or t
  misc_feature (1336)..(1336): n is a, c, g, or t
tagagaaattactatgagaggatcgcatcaccatcaccatcacggatcctatttaggtgacactatagaatcgtcgacccacgcgtccgctcaaaatccagcccttgagtggaatatggccagcagcatacggcggcatcaagaaaggagagcaattttgacccccgttttgacagatttttctgtccgaataactggagcacctgctgtcattttcaccaaagtagtttctccagaaaatttgcatactgaggagattttagtgtgtggccattccttagaagtgaatataaccacaaacctggacttcttcctaagtgtggctcaagttcaactcttacatcagttaatagtagcaaatatgactggactggaaccatcaaacaaggctgcagagatctctaaacaagaacagaaaaaagtggatatatttgatggaggcatggctgaaacctcatctcgctacagtggtgctcaggatagtggaattggcagtgacagtgttaaaatcagaatagtgcaaatagagcagcacagtggtgccagtcagcatcgcattgcccgtccctcacgccagtcatcaattgtaaaaaatctaaattttattccctttgacatatttattactgcaagtagaatctcactaatgacctattcctgtatggccttatccaaatcgaaatcacaagaacagaagaataatgaaaaaacagacaagagttcattaaatctcccagaagttgattcagatgttgctaagcccaaccaggcatgtatttccacggtgacagcagaagatctcttaaggagcagcatttcttttccttcagggaaaaaaataggggtcctctctcttgaaagtcttcatgcatccacaaggtcatctgctagacaagcacttggtataactattgttcggcagcctggtcgaagaagaactggtgactnacagctagagcctttctgtactttattgggtcccagccttccttgcttctgagttgtcccccaaaagcagcgagnggaagtancctttttgangctgggctaaaaggggggccnctgatacaatgtananatcngggaanacctgcctgaaccctngattatggcnnggttggctacaaacnggccnggaaaaaaaacccnaaaggggatccccctcnntnaaacctnaattaaaacttcganggnccccggagcnnttggaatncaanccnttgaancancggattnccacngganaaaanctttttaaaaaaaaaagccccnttgncannngaaacncccccgcccnccgggaaagnattcccccccatncgggangtcncccntnggggggg

SEQ ID NO: 132 - DNA, 1145 bp, Homo Sapiens
  misc_feature (1)..(1): n is a, c, g, or t
  misc_feature (860)..(860): n is a, c, g, or t
  misc_feature (910)..(910): n is a, c, g, or t
  misc_feature (931)..(931): n is a, c, g, or t
  misc_feature (948)..(948): n is a, c, g, or t
  misc_feature (969)..(969): n is a, c, g, or t
  misc_feature (977)..(977): n is a, c, g, or t
  misc_feature (989)..(989): n is a, c, g, or t
  misc_feature (1004)..(1004): n is a, c, g, or t
  misc_feature (1007)..(1007): n is a, c, g, or t
  misc_feature (1011)..(1011): n is a, c, g, or t
  misc_feature (1014)..(1015): n is a, c, g, or t
  misc_feature (1027)..(1027): n is a, c, g, or t
  misc_feature (1031)..(1031): n is a, c, g, or t
  misc_feature (1052)..(1052): n is a, c, g, or t
  misc_feature (1065)..(1065): n is a, c, g, or t
  misc_feature (1074)..(1074): n is a, c, g, or t
  misc_feature (1097)..(1097): n is a, c, g, or t
  misc_feature (1099)..(1099): n is a, c, g, or t
  misc_feature (1107)..(1107): n is a, c, g, or t
  misc_feature (1115)..(1115): n is a, c, g, or t
  misc_feature (1119)..(1119): n is a, c, g, or t
  misc_feature (1127)..(1127): n is a, c, g, or t
  misc_feature (1129)..(1129): n is a, c, g, or t
  misc_feature (1133)..(1134): n is a, c, g, or t
  misc_feature (1141)..(1141): n is a, c, g, or t
  misc_feature (1144)..(1144): n is a, c, g, or t
nattagagaaattactatgagaggatcgcatcaccatcaccatcacggatcctatttaggtgacactatagaatcgtcgacccacgcgtccgcccacgcgtccgctccactatggacagagcctccactgagctgctgcctgcccgccacatacccagctgacatgggcaccgcaggagccatgcagctgtgctgggtgatcctgggcttcctcctgttccgaggccacaactcccagcccacaatgacccagacctctagctctcagggaggccttggcggtctaagtctgaccacagagccagtttcttccaacccaggatacatcccttcctcagaggctaacaggccaagccatctgtccagcactggtaccccaggcgcaggtgtccccagcagtggaagagacggaggcacaagcagagacacatttcaaactgttccccccaattcaaccaccatgagcctgagcatgagggaagatgcgaccatcctgcccagccccacgtcagagactgtgctcactgtggctgcatttggtgttatcagcttcattgtcatcctggtggttgtggtgatcatcctagttggtgtggtcagcctgaggttcaagtgtcggaagagcaaggagtctgaagatccccagaaacctgggagttcagggctgtctgaaagctgctccacagccaatggagagaaagacagcatcacccttatctccatgaagaacatcaacatgaataatggcaaacaaagtctctcagcagagaaggttctttaaaagcaactttgggtccccatgagtccaaggatgatgcagctgccctgtgactacaaggaggaagagatggaattagtanaggcaatgaaccacatgtaaattattttattgtttcatgtctgcttctanatctaaaggaacactagcatngccccaaaatctgggancaagctaccaacaggggaaantcttttcntgtatggacagnctgctggggaaaaantgnctgnttnntcccacctcttnaaancccaggaaaaaggaaggtganaaaaaaaaaaacnaggaaaagngatgagggggattgaaactttcnantttggcanaaaaatantttntaagcctngngttnnaaaaaanaana

SEQ ID NO: 133 - DNA, 714 bp, Homo Sapiens
  misc_feature (58)..(58): n is a, c, g, or t
  misc_feature (63)..(63): n is a, c, g, or t
  misc_feature (70)..(70): n is a, c, g, or t
  misc_feature (294)..(294): n is a, c, g, or t
  misc_feature (362)..(362): n is a, c, g, or t
  misc_feature (376)..(376): n is a, c, g, or t
  misc_feature (423)..(423): n is a, c, g, or t
  misc_feature (441)..(441): n is a, c, g, or t
  misc_feature (450)..(450): n is a, c, g, or t
  misc_feature (461)..(461): n is a, c, g, or t
  misc_feature (487)..(487): n is a, c, g, or t
  misc_feature (491)..(491): n is a, c, g, or t
  misc_feature (500)..(500): n is a, c, g, or t
  misc_feature (502)..(502): n is a, c, g, or t
  misc_feature (520)..(520): n is a, c, g, or t
  misc_feature (539)..(539): n is a, c, g, or t
  misc_feature (557)..(558): n is a, c, g, or t
  misc_feature (560)..(560): n is a, c, g, or t
  misc_feature (565)..(565): n is a, c, g, or t
  misc_feature (568)..(568): n is a, c, g, or t
  misc_feature (570)..(570): n is a, c, g, or t
  misc_feature (580)..(581): n is a, c, g, or t
  misc_feature (589)..(589): n is a, c, g, or t
  misc_feature (603)..(603): n is a, c, g, or t
  misc_feature (638)..(638): n is a, c, g, or t
  misc_feature (640)..(641): n is a, c, g, or t
  misc_feature (687)..(687): n is a, c, g, or t
  misc_feature (699)..(701): n is a, c, g, or t
  misc_feature (705)..(705): n is a, c, g, or t
  misc_feature (711)..(711): n is a, c, g, or t
attagagagattactatgagaggatcgcatcaccatcaccatcacggatcctatttangtganactatanaatcgtcgacccacgcgtccgcctcaacgacgagacctggtacatcctgtcctcctgcatcggctccttcttcgcgccctgcctcatcatgggcctggtctacgcgcgcatctaccgagtggccaagctgcgcacgcgcacgctcagcgagaagcgcgcccccgtgggccccgacggtgcgtccccgactaccgaaaacgggctgggcgcggcggcaggcgcangcgagaacgggcactgcgcgcccccgcccgccgacgtggagccggacgagagcagcgcagcggccganaggcggcggcgccngggcgcgttgcggcggggcgggcggcggcgagcgggcgccgaggggngcgcgggcggtgcggacngtcaggggncggctgaatcnggggcgctgaccgcctccaggtcccngggnaccggtggncncctgtcgcgcgccagctngcgctccgtctagttcttnctgtcgcgccggcgccgnncncgcancancntgtgccgccnnaaggtggnccaaggcgcgcganaagcgcttcacctttgtgctggctgtggtcatggntnngttcatgctctgctggttccccttcttcttcaactacagcctgtanagcatctgccgnnnaggnctgtcnagg

SEQ ID NO: 134 - DNA, 930 bp, Homo Sapiens
  misc_feature (3)..(3): n is a, c, g, or t
  misc_feature (357)..(357): n is a, c, g, or t
  misc_feature (368)..(368): n is a, c, g, or t
  misc_feature (397)..(397): n is a, c, g, or t
  misc_feature (430)..(430): n is a, c, g, or t
  misc_feature (482)..(482): n is a, c, g, or t
  misc_feature (512)..(512): n is a, c, g, or t
  misc_feature (546)..(546): n is a, c, g, or t
  misc_feature (549)..(549): n is a, c, g, or t
  misc_feature (636)..(636): n is a, c, g, or t
  misc_feature (659)..(659): n is a, c, g, or t
  misc_feature (682)..(682): n is a, c, g, or t
  misc_feature (694)..(694): n is a, c, g, or t
  misc_feature (713)..(713): n is a, c, g, or t
  misc_feature (724)..(724): n is a, c, g, or t
  misc_feature (759)..(759): n is a, c, g, or t
  misc_feature (762)..(762): n is a, c, g, or t
  misc_feature (807)..(807): n is a, c, g, or t
  misc_feature (810)..(810): n is a, c, g, or t
  misc_feature (819)..(820): n is a, c, g, or t
  misc_feature (823)..(823): n is a, c, g, or t
  misc_feature (827)..(827): n is a, c, g, or t
  misc_feature (830)..(831): n is a, c, g, or t
  misc_feature (840)..(840): n is a, c, g, or t
  misc_feature (891)..(892): n is a, c, g, or t
  misc_feature (896)..(896): n is a, c, g, or t
  misc_feature (909)..(911): n is a, c, g, or t
  misc_feature (913)..(913): n is a, c, g, or t
  misc_feature (915)..(915): n is a, c, g, or t
  misc_feature (918)..(918): n is a, c, g, or t
canttagagaaattactatgagaggatcgcatcaccatcaccatcacggtatcctatttaggtgacactatagaatcgtcgacccacgcgtccgcggaggtgctgttccgctgcccgccctgcacacccgagcgcctggccgcctgcgggcccccgccggttgcgccgcccgccgcggtggccgcagtggccggaggcgcccgcatgccatgcgcggagctcgtccgggagccgggctgcggctgctgctcggtgtgcgcccggctggagggcgaggcgtgcggcgtctacaccccgcgctgcggccaggggctgcgctgctatccccacccgggctccgagctgcccctgcaggcnctggtcatggncgagggcacttgtgagaagcgccgggacnccgagtatggcgccagcccggagcaggttgcanacaatggcgatgaccactcagaaggaagcctggtggaaaaccacgtggacancaccatgaacatgttgggcgggggaggcantgctggccggaagcccctcaagtcgggtatgaanganctggccgtgttccggaagaaggtcactgaacagcaccggcagatgggcaagggtggcaagcatcaccttggcctggaggagcccaanaagctgcgaccaccccctgccangactccctgccaacaggaactgnaccaggtcctgnagcggatctccaccatgcnccttccggatnagcggggccctctggaacacctctactccctgcanatncccaactgtgaaaagcatggcctgtaaaacctcaaaaattgcaanatntctctgaannggnaacntgnngaattgctngtttgttaaaccccaacaccggggaaaacttgatccagggaatcccccaannatcncgggggggaaccnnnantnttnattttttttaaa

SEQ ID NO: 135 - DNA, 822 bp, Homo Sapiens
  misc_feature (788)..(788): n is a, c, g, or t
  misc_feature (797)..(797): n is a, c, g, or t
  misc_feature (801)..(822): n is a, c, g, or t
tagagaaattactatgagaggatcgcatcaccatcaccatcacggatcctatttaggtgacactatagaatcgtcgacccacgcgtccggcaagatgggtcaccagcagctgtactggagccacccgcgaaaattcggccagggttctcgctcttgtcgtgtctgttcaaaccggcacggtctgatccggaaatatggcctcaatatgtgccgccagtgtttccgtcagtacgcgaaggatatcggtttcattaagaaagacctgagctgtcttccttggcactgcctatggaggtgacacccatctcctccatcatggccatcctgagaccgctcgcgaagcccaagatcatcaaaaagagcaccaagttcactgggaaccagtcagactgatatgtcaaaattaagggtaactggtggaaacacagaggtattgacaacagggttcatagaaggtttgagggccagatctatgcccaacattggttatgggagaaacaaaaagacaaagcacatactgcccagtggcttctggaagttcctggtccacaacgttaaggagctggaagtactgctggtgagcaacaaatcttactgtgttgagatcactcatgatgtttcttccaagaactgcaaagccatcttggaaagagcagcccaggtggtcatcagagtcaccaatgccaatgccagcctgcacagtgcagaaagtgaatagacagtgaatgtgtttgttttattggggtttaaataaaaccaataaaactgtaaaaacaaaaaccaccaanaaaaaaaanaaannnnnnnnnnnnnnnnnnnnnn

SEQ ID NO: 136 - DNA, 1145 bp, Homo Sapiens
  misc_feature (936)..(936): n is a, c, g, or t
  misc_feature (948)..(948): n is a, c, g, or t
  misc_feature (969)..(969): n is a, c, g, or t
  misc_feature (971)..(971): n is a, c, g, or t
  misc_feature (983)..(983): n is a, c, g, or t
  misc_feature (1009)..(1009): n is a, c, g, or t
  misc_feature (1015)..(1015): n is a, c, g, or t
  misc_feature (1042)..(1042): n is a, c, g, or t
  misc_feature (1059)..(1059): n is a, c, g, or t
  misc_feature (1068)..(1068): n is a, c, g, or t
  misc_feature (1072)..(1072): n is a, c, g, or t
  misc_feature (1084)..(1084): n is a, c, g, or t
  misc_feature (1090)..(1090): n is a, c, g, or t
  misc_feature (1097)..(1097): n is a, c, g, or t
  misc_feature (1103)..(1104): n is a, c, g, or t
  misc_feature (1106)..(1106): n is a, c, g, or t
  misc_feature (1110)..(1110): n is a, c, g, or t
  misc_feature (1117)..(1117): n is a, c, g, or t
  misc_feature (1128)..(1128): n is a, c, g, or t
  misc_feature (1133)..(1133): n is a, c, g, or t
  misc_feature (1141)..(1143): n is a, c, g, or t
agagaaattactatgagaggatcgcatcaccatcaccatcacggatcctatttaggtgacactatagaatcgtcgacccacgcgtccgcccacgcgtccgcccacgcgtccgcccacgcgtccgctcttgcaaacttgaccattccagacttagactgggaattggttcttaaagaatataagttggttccatacctcaaggataaactaaaaccaggtgctgcagaagatgatcttgttttagaagtggttataatgattggaactgtatccatggatgactcttgtgctgcattgctagccaaatctggcataatccctgcactcattgaattgctaaatgctcaacaagaagatgatgaatttgtgtgtcagataatttatgtcttctaccagatggttttccaccaagccacaagagacgtcataatcaaggaaacacaggctccagcatatctcatagacctaatgcatgataagaataatgaaatccgaaaggtctgtgataatacattagatattatagcggaatatgatgaagaatgggctaagaaaattcagagtgaaaagtttcgctggcataactctcagtggctggagatggtagagagtcgtcagatggatgagagtgagcagtacttgtatggtgatgatcgaattgagccatacattcatgaaggagatattctcgaaagacctgaccttttctacaactcagatggattaattgcctctgaaggagccataagtcccgatttcttcaatgattaccaccttcaaaatggagatgttgttgggcagcattcatttcctggcagccttggaatggatggctttggccaaccagttggcattcttggacgccctgccacagcatatggattccgccctgatgaaccttactactatggctatggatcttgataaagtatctgnttccatgtgtantctcagcttaaaaaaatctgngngggttgggttantttgggatctttgcctaataatgcangtggangtaatggggggccggggttggttttantttaaaaggtggtagcngcaaataancccngcccccctgtcntcggtnaagtacngtgganncngacnttgttcnccctcaacccnatctnggggctannnac

SEQ ID NO: 137 - DNA, 1051 bp, Homo Sapiens
  misc_feature (10)..(10): n is a, c, g, or t
  misc_feature (729)..(729): n is a, c, g, or t
  misc_feature (735)..(735): n is a, c, g, or t
  misc_feature (840)..(840): n is a, c, g, or t
  misc_feature (855)..(855): n is a, c, g, or t
  misc_feature (864)..(864): n is a, c, g, or t
  misc_feature (887)..(887): n is a, c, g, or t
  misc_feature (895)..(895): n is a, c, g, or t
  misc_feature (897)..(897): n is a, c, g, or t
  misc_feature (922)..(922): n is a, c, g, or t
  misc_feature (932)..(932): n is a, c, g, or t
  misc_feature (938)..(938): n is a, c, g, or t
  misc_feature (945)..(945): n is a, c, g, or t
  misc_feature (955)..(955): n is a, c, g, or t
  misc_feature (963)..(963): n is a, c, g, or t
  misc_feature (985)..(986): n is a, c, g, or t
  misc_feature (998)..(998): n is a, c, g, or t
  misc_feature (1010)..(1010): n is a, c, g, or t
  misc_feature (1016)..(1016): n is a, c, g, or t
  misc_feature (1018)..(1018): n is a, c, g, or t
  misc_feature (1024)..(1024): n is a, c, g, or t
  misc_feature (1027)..(1027): n is a, c, g, or t
  misc_feature (1033)..(1034): n is a, c, g, or t
  misc_feature (1040)..(1040): n is a, c, g, or t
  misc_feature (1042)..(1044): n is a, c, g, or t
  misc_feature (1046)..(1046): n is a, c, g, or t
  misc_feature (1049)..(1049): n is a, c, g, or t
agaaattacnatgagaggatcgcatcaccatcaccatcacggatcctatttaggtgacactatagaatcgtcgacccacgcgtccgggccaaactgcagaccggctgacgcggtgctgggcctgggcctggagcacggggctcaagttcccactttgtgcgtttggagccaagtggggcctgaaagccctggcagcagtggctggtcccctccctgtcatggcttactggaccgggcagccctagggccttgccccctactgcctccccaggccagctgaggaagaggatgagcagtgcaggctggctcagccctgggtagcagggacagagcaggtggccaggactggggacagtgggctttagtgcaggggcttttgcactggactgcaagccctgagcaggtgacctgagcaggtgtgtgaccagtgcctgtctgtctgcaatagccctgaccctctattctgcaccctgtgagccaccgagactgaaccaaacccaggaagcggcgccaccaaccagcctcgcagaggcagaggccctggagcagtgacagcacaggagatctgctggctcgggggaaggggaggaaagaggaaaacaaagggagtgatcgagtgagcctcgccccgccctccctgcgccggcccatgatgtgtcagtcagaggcgcggcaaggaccagagctccgcgcggcgaaatggttgcacttcccccagctggccctgangcggangctggggcagctgaactgcatgtccagacccgctctgaaactgcgctcctggcccttgaccgtcctctactacctcctgcccttcggcgccctcaaaccgctcanccgggtgggatggangcccgtaancagggtggctttgtacaagtcantgccaacncncttgctgtcacggggcctggggtcncctcaatcangtgganctgccanactggctgcncaggcccntctaaagcctgtaaatctgganntttggggtgaanatgaaaaagccnctgtgnanaactgnatnattacnnaacttnannnanttntt

SEQ ID NO: 138 - DNA, 1103 bp, Homo Sapiens
  misc_feature (730)..(730): n is a, c, g, or t
  misc_feature (752)..(752): n is a, c, g, or t
  misc_feature (789)..(789): n is a, c, g, or t
  misc_feature (829)..(829): n is a, c, g, or t
  misc_feature (837)..(837): n is a, c, g, or t
  misc_feature (865)..(865): n is a, c, g, or t
  misc_feature (904)..(904): n is a, c, g, or t
  misc_feature (920)..(920): n is a, c, g, or t
  misc_feature (925)..(925): n is a, c, g, or t
  misc_feature (930)..(930): n is a, c, g, or t
  misc_feature (943)..(943): n is a, c, g, or t
  misc_feature (946)..(946): n is a, c, g, or t
  misc_feature (949)..(949): n is a, c, g, or t
  misc_feature (954)..(954): n is a, c, g, or t
  misc_feature (966)..(967): n is a, c, g, or t
  misc_feature (971)..(971): n is a, c, g, or t
  misc_feature (973)..(974): n is a, c, g, or t
  misc_feature (993)..(993): n is a, c, g, or t
  misc_feature (1003)..(1003): n is a, c, g, or t
  misc_feature (1010)..(1010): n is a, c, g, or t
  misc_feature (1012)..(1012): n is a, c, g, or t
  misc_feature (1016)..(1016): n is a, c, g, or t
  misc_feature (1024)..(1024): n is a, c, g, or t
  misc_feature (1026)..(1026): n is a, c, g, or t
  misc_feature (1042)..(1042): n is a, c, g, or t
  misc_feature (1044)..(1044): n is a, c, g, or t
  misc_feature (1047)..(1047): n is a, c, g, or t
  misc_feature (1051)..(1051): n is a, c, g, or t
  misc_feature (1064)..(1064): n is a, c, g, or t
  misc_feature (1067)..(1067): n is a, c, g, or t
  misc_feature (1070)..(1070): n is a, c, g, or t
  misc_feature (1072)..(1072): n is a, c, g, or t
  misc_feature (1083)..(1083): n is a, c, g, or t
  misc_feature (1086)..(1087): n is a, c, g, or t
  misc_feature (1091)..(1092): n is a, c, g, or t
  misc_feature (1097)..(1097): n is a, c, g, or t
gagaaattactatgagaggatcgcatcaccatcaccatcacggatcctatttaggtgacactatagaatcgtcgacccacgcgtccggcgtcaccgcctccaccacccaggggcagcagctgtcggaggaggagctggagcggctggaggaggcctgcgacatggcgctggagctgaacgcctccaagcaccgcatctacgagtatgtggagtcccggatgtccttcatcgcacccaacctgtccatcattatcggggcatccacggccgccaagatcatgggtgtggccggcggcctgaccaacctctccaagatgcccgcctgcaacatcatgctgctcggggcccagcgcaagacgctgtcgggcttctcgtctacctcagtgctgccccacaccggctacatctaccacagtgacatcgtgcagtccctgccaccggatctgcggcggaaagcggcccggctggtggccgccaagtgcacactggcagcccgtgtggacagtttccacgagagcacagaagggaaggtgggctacgaactgaaggatgagatcgagcgcaaattcgacaagtggcaggagccgccgcctgtgaagcaggtgaagccgctgcctgcgcccctggatggacagcggaagaagcgaggcggccgctccctatagtgagtcgtattaagcttaattagctgagcttggactcctgttgatagatccagtaatgacctcanaactccatctggatttgttcanaacgctcggttgccgccgggcgttttttattggtganaatcccaagctagcttggcgaagattttcagggagctaangaaagctnaaaatgggaaaaaaaaaaatcactgganataccaccgttgaaatatcccaatgggcattcgtaaaanaaaattttgagggcanttcantcagnttgctccaatggnacntanaaacnaaaacgtttcanntggnannattacggccttttttaaanaaccgtaaanaaaaaanancccnaaattttntncggggcctttattccnanttnttgnccccctaataaangcntcntnccggaaatttnctnntggnnaaatnaaaaaa

SEQ ID NO: 139 - DNA, 892 bp, Homo Sapiens
ctatgagaggatcgcatcaccatcaccatcacggatcctatttaggtgacactatagaatcgtcgacccacgcgtccggtttttcacagtacgttaacggggagatgaattcgccgactctgtcttgcagagggcgtgtgcgtcatcccacgttgcctgggaaaacaagcattaacaagtgtgagcgcgggtcaccgtggaaatggtacagaagggggcccacggcgggatcattagtgttactttgcccctggaggaagaaggccctgcgtcatttcccatccagagtgggaaagggagagagactgagagataaaaaggaaaataaacagcccttttttatttatttatttttttttgagacggagttttgctcttgttgcccaggctggagtgcagtggcgcgatctcggctcactgcaacctctgcctcccaggttcaaacgattctcctgcctcagcctcctgagtagctgggattacaagtgcttgccaccatgcccggaacatttttatatttttggtagagacggggtttcaccatgttgatcaggctggtcttgaactcctgacctcaagtgatctgcccacctcagcctcccaaagtgctgtgattacaggcatgagccactgcgccgggccataaatagccttttatagcaataagttgtgctcagaaaaagccccgacgtggcatgaactctttgcagtgccagagtagaagttacaggcacggaggagagaggactccccaggccagcatcttccttgtcaccatcccacagggggttgcctgcctgaccagacgttgactatgttgtttgcccaaacagggaaaagttaagaagccaggaggtcaaatgtcgacccggaagttcacccatgcgcgctg

SEQ ID NO: 140 - DNA, 1029 bp, Homo Sapiens
  misc_feature (691)..(691): n is a, c, g, or t
  misc_feature (778)..(778): n is a, c, g, or t
  misc_feature (782)..(782): n is a, c, g, or t
  misc_feature (806)..(806): n is a, c, g, or t
  misc_feature (837)..(837): n is a, c, g, or t
  misc_feature (849)..(849): n is a, c, g, or t
  misc_feature (882)..(882): n is a, c, g, or t
  misc_feature (884)..(884): n is a, c, g, or t
  misc_feature (891)..(891): n is a, c, g, or t
  misc_feature (898)..(898): n is a, c, g, or t
  misc_feature (918)..(918): n is a, c, g, or t
  misc_feature (922)..(922): n is a, c, g, or t
  misc_feature (924)..(924): n is a, c, g, or t
  misc_feature (932)..(932): n is a, c, g, or t
  misc_feature (939)..(939): n is a, c, g, or t
  misc_feature (946)..(946): n is a, c, g, or t
  misc_feature (949)..(949): n is a, c, g, or t
  misc_feature (952)..(952): n is a, c, g, or t
  misc_feature (956)..(956): n is a, c, g, or t
  misc_feature (960)..(960): n is a, c, g, or t
  misc_feature (962)..(962): n is a, c, g, or t
  misc_feature (966)..(966): n is a, c, g, or t
  misc_feature (982)..(982): n is a, c, g, or t
  misc_feature (985)..(986): n is a, c, g, or t
  misc_feature (995)..(995): n is a, c, g, or t
  misc_feature (1001)..(1001): n is a, c, g, or t
  misc_feature (1003)..(1003): n is a, c, g, or t
  misc_feature (1015)..(1015): n is a, c, g, or t
  misc_feature (1017)..(1017): n is a, c, g, or t
  misc_feature (1025)..(1025): n is a, c, g, or t
  misc_feature (1027)..(1028): n is a, c, g, or t
atagagagaattaactatgagaggatcgcatcaccatcaccatcacggatcctatttaggtgacactatagaatcgtcgacccacgcgtccgcgagcgagcgagcggagaggcggcctcaaagtttgcggcgggcgggcgggcgcggagcctccaagatgccgttccacccggtgacggcggcgttgatgtaccggggcatctacaccgtgcccaacctgctgtcggagcagcgcccggtggacatcccggaggacgagctggaggagatccgagaggccttcaaggtgtttgaccgtgacggcaatggcttcatctccaagcaggagctgggcacagccatgcgctcactgggttacatgcccaacgaggtggagctggaggtcatcatccagcggctggacatggatggtgatggtcaagtggactttgaggagtttgtgacccttctgggacccaaactctccacctcagggatcccagagaagttccatggcaccgactttgatactgtcttctggaagtgcgacatgcagaagctgacggtggatgagctgaagcggctgctctacgacaccttctgcgagcacctgtccatgaaggacatagagaacatcatcatgacggaggaggagagccacctgggcacagccgaggagtgtcccgtggatgtggagacctgctccaaccancagatccgccagacttgcgtgcgcaagagtctcatctgcgccttcgccatcgccttcatcatcagtgtcatgctcattgcggccaancagntgctgcgcagtggcatgaaataanacgccacctggatgccccatccaccgcatgnggtgcccgttgncccgccccaaaccaaccgccgacctgaaaaacntntcccttngcccggnttccctggggccccccattntggngngtactttnagggccntgggtantcnaanggancccntncccnaccccaccaacgggtnctnnactttgaancttgtngnccttggcttgtngnaaggcccngnng

SEQ ID NO: 141 - DNA, 744 bp, Homo Sapiens
  misc_feature (187)..(187): n is a, c, g, or t
  misc_feature (619)..(619): n is a, c, g, or t
  misc_feature (635)..(635): n is a, c, g, or t
  misc_feature (651)..(651): n is a, c, g, or t
  misc_feature (653)..(653): n is a, c, g, or t
  misc_feature (661)..(661): n is a, c, g, or t
  misc_feature (664)..(664): n is a, c, g, or t
  misc_feature (677)..(677): n is a, c, g, or t
  misc_feature (691)..(691): n is a, c, g, or t
  misc_feature (693)..(694): n is a, c, g, or t
  misc_feature (703)..(703): n is a, c, g, or t
  misc_feature (710)..(710): n is a, c, g, or t
  misc_feature (712)..(712): n is a, c, g, or t
  misc_feature (717)..(717): n is a, c, g, or t
  misc_feature (724)..(724): n is a, c, g, or t
  misc_feature (727)..(727): n is a, c, g, or t
  misc_feature (729)..(731): n is a, c, g, or t
  misc_feature (733)..(734): n is a, c, g, or t
  misc_feature (736)..(736): n is a, c, g, or t
  misc_feature (738)..(738): n is a, c, g, or t
  misc_feature (740)..(741): n is a, c, g, or t
  misc_feature (744)..(744): n is a, c, g, or t
tagagaaattaactatgagaggatcgcatcaccatcaccatcacggatcctatttaggtgacactatagaatcgtcgacccacgcgtccgacttcaccgagtgggcctctctctttcggcactactccccacccccatttggcctgctgggaaccgctccagcttacagctttggaatcgcaggagntgcgctcgggggtgcccttccactggcatggacccgggtactcagaagtgatctacggtcgtaagcgctggttcctttacccacctgagaagacgccagagttccaccccaacaagaccacgctggcctggctccgggacacatacccagccctgccaccgtctgcacggcccctggagtgtaccatccgggctggtgaggtgctgtacttccccgaccgctggtggcatgctacgctcaaccttgacaccagcgtcttcatctccaccttcctcggctagccaaaacagctggcaggactgccggtcacacaccagcacgtcccacctcgtgctcacggattttattacacagatagtggcggcaatggcctcagcccagcccaccctcacctgcttttccagcccacaaagggggacgatcacggcccancaaaagcgatgctganaggggaaacagtccanantccaacancanaacttgggggaancggtcggggtggcnannaacataaantatgtanangggcngggggcntcngnnnanngntncnntgn

SEQ ID NO: 142 - DNA, 1275 bp, Homo Sapiens
  misc_feature (4)..(4): n is a, c, g, or t
  misc_feature (902)..(902): n is a, c, g, or t
  misc_feature (940)..(940): n is a, c, g, or t
  misc_feature (954)..(954): n is a, c, g, or t
  misc_feature (956)..(956): n is a, c, g, or t
  misc_feature (958)..(958): n is a, c, g, or t
  misc_feature (963)..(963): n is a, c, g, or t
  misc_feature (986)..(986): n is a, c, g, or t
  misc_feature (989)..(989): n is a, c, g, or t
  misc_feature (1002)..(1002): n is a, c, g, or t
  misc_feature (1005)..(1005): n is a, c, g, or t
  misc_feature (1022)..(1022): n is a, c, g, or t
  misc_feature (1051)..(1051): n is a, c, g, or t
  misc_feature (1061)..(1061): n is a, c, g, or t
  misc_feature (1067)..(1068): n is a, c, g, or t
  misc_feature (1083)..(1083): n is a, c, g, or t
  misc_feature (1094)..(1094): n is a, c, g, or t
  misc_feature (1100)..(1100): n is a, c, g, or t
  misc_feature (1108)..(1108): n is a, c, g, or t
  misc_feature (1119)..(1119): n is a, c, g, or t
  misc_feature (1125)..(1125): n is a, c, g, or t
  misc_feature (1127)..(1127): n is a, c, g, or t
  misc_feature (1138)..(1138): n is a, c, g, or t
  misc_feature (1141)..(1141): n is a, c, g, or t
  misc_feature (1151)..(1151): n is a, c, g, or t
  misc_feature (1162)..(1162): n is a, c, g, or t
  misc_feature (1169)..(1169): n is a, c, g, or t
  misc_feature (1171)..(1171): n is a, c, g, or t
  misc_feature (1173)..(1173): n is a, c, g, or t
  misc_feature (1186)..(1186): n is a, c, g, or t
  misc_feature (1189)..(1189): n is a, c, g, or t
  misc_feature (1209)..(1210): n is a, c, g, or t
  misc_feature (1214)..(1215): n is a, c, g, or t
  misc_feature (1219)..(1219): n is a, c, g, or t
  misc_feature (1224)..(1224): n is a, c, g, or t
  misc_feature (1231)..(1233): n is a, c, g, or t
  misc_feature (1244)..(1244): n is a, c, g, or t
  misc_feature (1247)..(1247): n is a, c, g, or t
  misc_feature (1269)..(1270): n is a, c, g, or t
  misc_feature (1273)..(1273): n is a, c, g, or t
acantagagaaaattactatgaagaggatcgcatcaccatcaccatcacggatcctatttaggtgacactatagaatcgtcgacccacgcgtccgaggccacccctctggtcctcaaggccacagctggcttacgcctgttacctggagaaaaggcccagaagttactgcagaaggtgaaagaagtatttaaagcatcgcctttccttgtaggggatgactgtgtttccatcatgaacggaacagatgaaggcgtttcggcgtggatcaccatcaacttcctgacaggcagcttgaaaactccaggagggagcagcgtgggcatgctggacttgggcggaggatccactcagatcgccttcctgccacgcgtggagggcaccctgcaggcctccccacccggctacctgacggcactgcggatgtttaacaggacctacaagctctattcctacagctacctcgggctcgggctgatgtcggcacgcctggcgatcctgggcggcgtggaggggcagcctgcggcaagcctgcacgagctgtgtgctgccagagtgtcagaggtccttcaaaacagagtgcacaggacggaggaagtgaagcatgtggacttctatgctttctcctactattacgaccttgcagctggtgtgggcctcatagatgcggagaagggaggcagcctggtggtgggggacttcgagatcgcagccaagtacggtgggagtcacctggagcgtgaagggacgtgtctcatccccagtgtgtcggaccctggagacacagccgcagagcagccccttctcatgcatggacctcacctacgtcagcctgctactccaggagttcggctttcccaggagcaaagtgctgaagctcactcggaaaattgacaatgttganaccagctgggctctgggggcccatttttcattacatcnactcccctgaacanananaaaantccagcctcatagtggccgaacnatncctgtccccgtcncantgtctgtgtgtctgcanaaacccctcctgtcctggacgtgacttcntcctgagganccaaannaaaggccggggtggnactttttgcancctggntctgggantttgaaaaagnctgggngntgccctggaanaanccttttcaantcaatttggcnaaaaggntntntggaactgggccntgntcaatgccccctttttgccnngggnncaanggggngggaccnnnaaaaaaccccnggnccccccttggggggaggggggnnccngg

SEQ ID NO: 143 - DNA, 964 bp, Homo Sapiens
  misc_feature (827)..(827): n is a, c, g, or t
  misc_feature (935)..(935): n is a, c, g, or t
  misc_feature (942)..(964): n is a, c, g, or t
gagaaattactatgagaggatcgcatcaccatcaccatcacggatcctatttaggtgacactatagaatcgtcgacccacgcgtccgcggacgcgtgggtggggccccgggcggcgttgaccatgacccagcagggcgcggcgctgcagaactacaacaacgagctggtcaagtgcatagaggagctgtgccagaagcgggaggagctgtgccggcagatccaggaggaggaggacgagaagcagcggctgcagaatgaggtgaggcagctgacagagaagctggcccgcgtcaacgagaacctggcacgcaagattgcctctcgcaacgagttcgaccggaccatcgcggagacggaggccgcctacctcaagatcctggagagctcccagactttgctcagcgttctcaagagggaagctgggaacctgaccaaggctacagccccagaccagaaaagtagcggcggcagggacagctgaccagaccacgggcagggcctgcctccgtgtgcccctcagctcagccccagcaagtgtgtgctcagagcatctttgttcttcacggcagcagctaccttccctcactgtctcaggtgccgagaggggcaggtgccagcctccactggcatcagtgacaagcccagggcacagcccacccgggggtcctcgcttcatgctcacacaggctatggggatggtgggctccaggtcagctctgcaaggggcttgtctctgtggcacccacactcctgccctgccagggaggctctggttgtctgagcaccatgggggccccctcaccttgtccctcctcagccagcagangcccagggcaagggacaggaggacaggggttctccttcaccacagaacccaaacctcaggtctcacccctgtggcctgtgattatgaataaagattatctttgtaaanaaaaaannnnnnnnnnnnnnnnnnnnnnn

SEQ ID NO: 144 - DNA, 1124 bp, Homo Sapiens
  misc_feature (926)..(926): n is a, c, g, or t
  misc_feature (937)..(937): n is a, c, g, or t
  misc_feature (950)..(950): n is a, c, g, or t
  misc_feature (962)..(962): n is a, c, g, or t
  misc_feature (965)..(965): n is a, c, g, or t
  misc_feature (1011)..(1011): n is a, c, g, or t
  misc_feature (1013)..(1013): n is a, c, g, or t
  misc_feature (1021)..(1021): n is a, c, g, or t
  misc_feature (1028)..(1028): n is a, c, g, or t
  misc_feature (1035)..(1035): n is a, c, g, or t
  misc_feature (1039)..(1039): n is a, c, g, or t
  misc_feature (1043)..(1043): n is a, c, g, or t
  misc_feature (1056)..(1056): n is a, c, g, or t
  misc_feature (1060)..(1060): n is a, c, g, or t
  misc_feature (1062)..(1062): n is a, c, g, or t
  misc_feature (1064)..(1064): n is a, c, g, or t
  misc_feature (1067)..(1067): n is a, c, g, or t
  misc_feature (1073)..(1073): n is a, c, g, or t
  misc_feature (1080)..(1080): n is a, c, g, or t
  misc_feature (1082)..(1083): n is a, c, g, or t
  misc_feature (1085)..(1085): n is a, c, g, or t
  misc_feature (1093)..(1093): n is a, c, g, or t
  misc_feature (1098)..(1098): n is a, c, g, or t
atagagaaattactatgagaggatcgcatcaccatcaccatcacggatcctatttaggtgacactatagaatcgtcgacccacgcgtccggaaccatgaacgcccacctgccgtttgctgtcattggcagcacagaagaactgaagataggcaacaagatgatgagggcgcggcagtatccttggggcactgtgcaggttgaaaacgaggcccactgcgactttgtgaagctgcgggagatgctgattcgggtcaacatggaggatctgcgggagcagacccacacccggcactatgagctgtatcgccgctgtaagctggaggagatgggcttcaaggacaccgaccctgacagcaaacccttcagtttacaggagacatatgaggccaaaaggaacgagttcctaggggaactccagaaaaaagaagaggagatgagacagatgttcgtccagcgagtcaaagagaaagaagcggagctcaaagaggcagagaaagagctgcacgagaagtttgaccgtctgaagaaactgcaccaggacgagaagaagaaactggaggataagaagaaatccctggatgatgaagtgaatgctttcaagcaaagaaagacggcggctgagctgctccagtcccagggctcccaggctggaggctcacagactctgaagagagacaaagagaagaaaaactttttttaatcttgtcttcagcagctgcactaagtctaaaggagaagactgccattatagaagagttagggttccatattgtctcaaatcagaaatcaaccaatttcctctccccctcaaactgcaagcacacacacatacaccacaccactcaacaagtgttcatgtgtcccctgtgtccaggcaagaagctctccttcctgactcccatggtatttttaaatgggaagtgtncttgtcctaancttaccaaggcangaaaaaaacccntcngaacctgggaaaatggacaaattgtaaccctccaaaaaaaaacctncngggacccntcccccnaattgtnaatnaacntgggggcaagaancctncncnttnggggtnttaaaantnntntttttgtncccangttttttttgaatttttttttttttt

SEQ ID NO: 145 - DNA, 1099 bp, Homo Sapiens
  misc_feature (704)..(704): n is a, c, g, or t
  misc_feature (727)..(727): n is a, c, g, or t
  misc_feature (773)..(773): n is a, c, g, or t
  misc_feature (780)..(780): n is a, c, g, or t
  misc_feature (851)..(851): n is a, c, g, or t
  misc_feature (866)..(866): n is a, c, g, or t
  misc_feature (868)..(868): n is a, c, g, or t
  misc_feature (894)..(894): n is a, c, g, or t
  misc_feature (902)..(902): n is a, c, g, or t
  misc_feature (908)..(908): n is a, c, g, or t
  misc_feature (916)..(916): n is a, c, g, or t
  misc_feature (919)..(919): n is a, c, g, or t
  misc_feature (932)..(932): n is a, c, g, or t
  misc_feature (942)..(942): n is a, c, g, or t
  misc_feature (945)..(945): n is a, c, g, or t
  misc_feature (947)..(947): n is a, c, g, or t
  misc_feature (958)..(958): n is a, c, g, or t
  misc_feature (971)..(971): n is a, c, g, or t
  misc_feature (978)..(978): n is a, c, g, or t
  misc_feature (992)..(992): n is a, c, g, or t
  misc_feature (1003)..(1003): n is a, c, g, or t
  misc_feature (1005)..(1005): n is a, c, g, or t
  misc_feature (1015)..(1016): n is a, c, g, or t
  misc_feature (1022)..(1023): n is a, c, g, or t
  misc_feature (1032)..(1032): n is a, c, g, or t
  misc_feature (1040)..(1040): n is a, c, g, or t
  misc_feature (1043)..(1043): n is a, c, g, or t
  misc_feature (1049)..(1049): n is a, c, g, or t
  misc_feature (1066)..(1066): n is a, c, g, or t
  misc_feature (1074)..(1074): n is a, c, g, or t
  misc_feature (1081)..(1082): n is a, c, g, or t
  misc_feature (1084)..(1084): n is a, c, g, or t
  misc_feature (1088)..(1088): n is a, c, g, or t
  misc_feature (1091)..(1091): n is a, c, g, or t
  misc_feature (1094)..(1094): n is a, c, g, or t
  misc_feature (1097)..(1097): n is a, c, g, or t
gagaaattactatgagaggatcgcatcaccatcaccatcacggatcctatttaggtgacactatagaatcgtcgacccacgcgtccggtccagcagagcagcacggtgcccaggacacagagctcagtgcaggcactggcaacttctatttggaaagtgggggctcagcaagaactgattaccgagccattcaactagccaaggaaaaaaagcagagaggagcggggagcaatgcaggagcctcacagtctactcagagaaaaataaaagaaggcaaaatgagtcctccccatttccatgcaagccagaacagttggttgtgtgggagcctcgtggtgcccagcggaggacggccaggaccagctccagcagctggggtgcagtgcggggcgcagggcgtccaggtccagctggtgcaggatgacccctccggcgaaggtgtcctgccctcggcccgcggcccagccaccttcctccccttcctcactgtggacctgcccgtctacgtcctccaggaggtgctcccctcatctggaggccctgctggaccggaggccacccagttcccaggaagcactatcaacctgcaggatctgcagtgacggcagcctcggcctgggcaggcccaaggccacggtctaggacacaccttccctgagactcatgacatgagcctggggagacctcatttggtttccgttcanaaaaccagcgtagcccttttganacttttgggtacatttatcaaaaatgttttccttttgttttaccangaatganttcgggctatactctttgaaactgcctttgtgaacaaagtgctttggcaaggcaagggtctccctcagcanggctaggtgcactanancctctttccccgtgtcccgttggatntgaactgngtaacncttgttgnttnaaaaaaaaaaaantttttgcagnaananggtaaaaaaanaggttttttatcnaatgcancttgattttttggnaaaaaccaaangngggcctttcnnctttcnnggggttaanatccccanccncttggnaatggggttttgggggncaaatttnatttttnncncaanttntanggncc

SEQ ID NO: 146 - DNA, 1141 bp, Homo Sapiens
  misc_feature (1)..(2): n is a, c, g, or t
  misc_feature (842)..(842): n is a, c, g, or t
  misc_feature (892)..(892): n is a, c, g, or t
  misc_feature (944)..(944): n is a, c, g, or t
  misc_feature (950)..(950): n is a, c, g, or t
  misc_feature (955)..(955): n is a, c, g, or t
  misc_feature (957)..(957): n is a, c, g, or t
  misc_feature (964)..(964): n is a, c, g, or t
  misc_feature (969)..(969): n is a, c, g, or t
  misc_feature (981)..(981): n is a, c, g, or t
  misc_feature (994)..(994): n is a, c, g, or t
  misc_feature (1001)..(1001): n is a, c, g, or t
  misc_feature (1004)..(1004): n is a, c, g, or t
  misc_feature (1036)..(1037): n is a, c, g, or t
  misc_feature (1046)..(1046): n is a, c, g, or t
  misc_feature (1059)..(1059): n is a, c, g, or t
  misc_feature (1064)..(1064): n is a, c, g, or t
  misc_feature (1077)..(1077): n is a, c, g, or t
  misc_feature (1079)..(1079): n is a, c, g, or t
  misc_feature (1081)..(1081): n is a, c, g, or t
  misc_feature (1086)..(1086): n is a, c, g, or t
  misc_feature (1090)..(1090): n is a, c, g, or t
  misc_feature (1095)..(1095): n is a, c, g, or t
  misc_feature (1097)..(1098): n is a, c, g, or t
  misc_feature (1110)..(1110): n is a, c, g, or t
  misc_feature (1112)..(1112): n is a, c, g, or t
  misc_feature (1121)..(1121): n is a, c, g, or t
  misc_feature (1123)..(1123): n is a, c, g, or t
  misc_feature (1134)..(1134): n is a, c, g, or t
  misc_feature (1136)..(1136): n is a, c, g, or t
  misc_feature (1141)..(1141): n is a, c, g, or t
nntagagaaattactatgagaggatcgcatcaccatcaccatcacggatcctatttaggtgacactatagaatcgtcgacccacgcgtccgggcgacagtcggggttgcgagcggcccggggccggggcggccagggccgctgcaggacgagaccctgggtgtggcgtccgtgccctcgcagtggagggccgtccagggcatccgcggggagacgaaaagttgccagacggccagcattgccactgccagtgcatccgcccaggccaggaatcatgtggacgcccaggtgcagacggaggcccccgtgcctgtcagcgtgcagcccccgtcccagtacgacatacccaggctcgcagcctttcttcggagagtggaggccatggtcatccgagagctgaacaagaattggcagagccacgcgtttgatggcttcgaggtgaactggaccgagcagcagcagatggtgtcttgtctgtataccctgggctacccgccagcccaagcgcagggtctgcatgtgaccagcatctcctggaactccactggctctgtggtggcctgtgcctacggccggctggaccatggggactggagcacgcttaagtccttcgtgtgtgcctggaacctggaccggcgagacctgcgtccccagcaaccgtcggccgtggtggaggtccccagcgctgtcctgtgtctggccttccaccccacgcagccctcccacgtcgcaggagggctgtacagtggtgaggtgttggtgtgggacctgagccgtcttgaggacccgctgctgtggcgcacaggcctgacggatgacacccacacagaccctgtgtcccangtggtgtggctgcccgagcctgggcacagccaccgcttccaggtgctgantgtggccactgacgggaaggtgctactctggcagggcatcggggtaggccanctgcanctcananagggctnccccntggtcatgcaancactgccacggancaccaanctnaaaaaacatccccccggggaaaccaagtgggnnccacggcantggcctttttcanctttnaccctaagctgtntntntgggnaagnaaggngnnttccccctcaantnttcctgggnancttggaaaggnanccctn

SEQ ID NO: 147 - DNA, 1158 bp, Homo Sapiens
  misc_feature (3)..(12): n is a, c, g, or t
  misc_feature (928)..(928): n is a, c, g, or t
  misc_feature (933)..(933): n is a, c, g, or t
  misc_feature (938)..(938): n is a, c, g, or t
  misc_feature (960)..(960): n is a, c, g, or t
  misc_feature (982)..(982): n is a, c, g, or t
  misc_feature (985)..(985): n is a, c, g, or t
  misc_feature (1050)..(1051): n is a, c, g, or t
  misc_feature (1055)..(1055): n is a, c, g, or t
  misc_feature (1057)..(1057): n is a, c, g, or t
  misc_feature (1072)..(1072): n is a, c, g, or t
  misc_feature (1077)..(1077): n is a, c, g, or t
  misc_feature (1081)..(1081): n is a, c, g, or t
  misc_feature (1108)..(1108): n is a, c, g, or t
  misc_feature (1111)..(1111): n is a, c, g, or t
  misc_feature (1131)..(1131): n is a, c, g, or t
  misc_feature (1138)..(1138): n is a, c, g, or t
  misc_feature (1145)..(1158): n is a, c, g, or t
ttnnnnnnnnnnattagagaaaattactatgagaggatcgcatcaccatcaccatcacggatcctatttaggtgacactatagaatcgtcgacccacgcgtccgcgggagccgcagctatggagccgcaggaggagagagaaacgcaggttgctgcgtggttaaaaaaaatatttggagatcatcctattccacagtatgaggtgaacccacggaccacagagattttacatcacctttcagaacgcaacagggtccgggacagggatgtctacctggtaatagaggacttgaagcagaaagcaagtgaatacgagtcagaagccaagtatcttcaagaccttctcatggagagtgtgaatttttcccccgccaatctctctagcactggttccaggtatctgaatgctttggttgacagtgcggtggcccttgaaacaaaggatacctcgctagctagttttatccctgcagtgaatgatttgacctctgatctctttcgtaccaaatccaaaagtgaagaaatcaagattgaactggaaaaacttgaaaaaaatttaactgcaactttagtattagaaaaatgtctacaagaggatgtcaagaaagcagagttgcatctgtctacagaaagggccaaagttgataatcgtcgtcagaacatggactttctaaaagcaaagtcagaggaattcagatttggaatcaaggctgcagaggagcaactttcagccagaggcatggatgcttctctgtctcatcagtccttagtagcactatcagagaaactggcaagattaaagcaacagactatacctttgaagaaaaaattggagtcctatttagacttaatgccgaatccgtctcttgctcaagtgaaaattgaagaagcaaagcgagaactagatagcattgaagctgaacttacnagaanagtanacatgatggaactgtgacaaangccaaataaacatccttttccntancaagtaattgaataggactttacagagttcttttcctcttggcattcctaaaacaaactttctgnntctnanatacgaaaatcctantgaanaaanggttctacgggggtgcattttgggccnaanactagtttctattaaaagcntttcctnaaaaaannnnnnnnnnnnnn

SEQ ID NO: 148 - DNA, 1222 bp, Homo Sapiens
  misc_feature (850)..(850): n is a, c, g, or t
  misc_feature (862)..(862): n is a, c, g, or t
  misc_feature (874)..(874): n is a, c, g, or t
  misc_feature (996)..(996): n is a, c, g, or t
  misc_feature (1007)..(1007): n is a, c, g, or t
  misc_feature (1017)..(1017): n is a, c, g, or t
  misc_feature (1051)..(1051): n is a, c, g, or t
  misc_feature (1053)..(1053): n is a, c, g, or t
  misc_feature (1065)..(1065): n is a, c, g, or t
  misc_feature (1081)..(1081): n is a, c, g, or t
  misc_feature (1083)..(1083): n is a, c, g, or t
  misc_feature (1086)..(1086): n is a, c, g, or t
  misc_feature (1096)..(1096): n is a, c, g, or t
  misc_feature (1098)..(1098): n is a, c, g, or t
  misc_feature (1104)..(1104): n is a, c, g, or t
  misc_feature (1118)..(1118): n is a, c, g, or t
  misc_feature (1138)..(1138): n is a, c, g, or t
  misc_feature (1142)..(1142): n is a, c, g, or t
  misc_feature (1145)..(1145): n is a, c, g, or t
  misc_feature (1148)..(1148): n is a, c, g, or t
  misc_feature (1153)..(1153): n is a, c, g, or t
  misc_feature (1159)..(1159): n is a, c, g, or t
  misc_feature (1163)..(1163): n is a, c, g, or t
  misc_feature (1165)..(1165): n is a, c, g, or t
  misc_feature (1168)..(1168): n is a, c, g, or t
  misc_feature (1176)..(1176): n is a, c, g, or t
  misc_feature (1185)..(1185): n is a, c, g, or t
  misc_feature (1190)..(1190): n is a, c, g, or t
  misc_feature (1196)..(1196): n is a, c, g, or t
  misc_feature (1198)..(1199): n is a, c, g, or t
  misc_feature (1209)..(1209): n is a, c, g, or t
  misc_feature (1211)..(1211): n is a, c, g, or t
  misc_feature (1217)..(1217): n is a, c, g, or t
tagagaaattactatgagaggatcgcatcaccatcaccatcacggatcctatttaggtgacactatagaatcgtcgacccacgcgtccgcgccagcatgcccggcgtggcccgcctgccgctgctgctcgggctgctgctgctcccgcgtcccggccggccgctggacttggccgactacacctatgacctggcggaggaggacgactcggagcccctcaactacaaagacccctgcaaggcggctgcctttcttggggacattgccctggacgaagaggacctgagggccttccaggtacagcaggctgtggatctcagacggcacacagctcgtaagtcctccatcaaagctgcagttccaggaaacacttctacccccagctgccagagcaccaacgggcagcctcagaggggagcctgtgggagatggagaggtagatcccgtagccggcgggcggcgacgtcccgaccagagcgtgtgtggcccgatggggtcatcccctttgtcattgggggaaacttcactggtagccagagggcagtcttccggcaggccatgaggcactgggagaagcacacctgtgtcaccttcctggagcgcactgacgaggacagctatattgtgttcacctatcgaccttgcgggtgctgctcctacgtgggtcgccgcggcgggggcccccaggccatctccatcggcaagaactgtgacaagttcggcattgtggtccacgagctgggccacgtcgtcggcttctggcacgaacacactcggccagaccgggaccgccacgtttccatcgttcgtgagaacatccagccagggcaggagtataacttcctgaaanatggagcctcangaggtggagtcnctgggggaaaacctatgacttcgacagcatcatgcattacgctcggaaaacattctcaaggggcatcttcctggatacaattgtccccaagtatgaggtgaaacggggtgaaacctcccatnggccaaagganacggctcacnaagggggaaatttgcccaagccccgcaagctttnanaagtgccccaanctgtgaaaaaaccctngnaanaaaaccaaangnaatttntcctcccctgaaanccccaatgggttactctgcncaantcnctnggggnggggcntctntntcncccccggnaaaaaaaantcttnaaattnannttcctggaantntacccnaaccc

SEQ ID NO: 149 - DNA, 1109 bp, Homo Sapiens
  misc_feature (684)..(684): n is a, c, g, or t
  misc_feature (749)..(749): n is a, c, g, or t
  misc_feature (764)..(764): n is a, c, g, or t
  misc_feature (825)..(825): n is a, c, g, or t
  misc_feature (889)..(889): n is a, c, g, or t
  misc_feature (901)..(901): n is a, c, g, or t
  misc_feature (915)..(915): n is a, c, g, or t
  misc_feature (931)..(931): n is a, c, g, or t
  misc_feature (940)..(940): n is a, c, g, or t
  misc_feature (949)..(949): n is a, c, g, or t
  misc_feature (970)..(970): n is a, c, g, or t
  misc_feature (986)..(986): n is a, c, g, or t
  misc_feature (993)..(993): n is a, c, g, or t
  misc_feature (998)..(998): n is a, c, g, or t
  misc_feature (1006)..(1006): n is a, c, g, or t
  misc_feature (1008)..(1008): n is a, c, g, or t
  misc_feature (1020)..(1020): n is a, c, g, or t
  misc_feature (1027)..(1028): n is a, c, g, or t
  misc_feature (1031)..(1031): n is a, c, g, or t
  misc_feature (1036)..(1036): n is a, c, g, or t
  misc_feature (1038)..(1038): n is a, c, g, or t
  misc_feature (1040)..(1040): n is a, c, g, or t
  misc_feature (1044)..(1044): n is a, c, g, or t
  misc_feature (1066)..(1067): n is a, c, g, or t
  misc_feature (1070)..(1070): n is a, c, g, or t
  misc_feature (1072)..(1072): n is a, c, g, or t
  misc_feature (1081)..(1082): n is a, c, g, or t
  misc_feature (1087)..(1087): n is a, c, g, or t
  misc_feature (1104)..(1104): n is a, c, g, or t
  misc_feature (1108)..(1108): n is a, c, g, or t
cattagagaaattactatgagaggatcgcatcaccatcaccatcacggatcctatttaggtgacactatagaatcgtcgacccacgcgtccgcagcgctgccgggaactggaagcctttcggctcccgcagccgcagcggacgccctcccagatccaactttgccgcttccccgagctcgcgctgtagccgcggggggcgtgggcagggaggggagaagcggggtcagggggagggaccgggagggtgggtcgccggctcgccagccctccttcctttctgtgcaccttgcggtgggcggcgaacggcagccgcggcagcagctagggggcttgtgcacacagcgagggagacttagggactggcagacggacggacggacggcgaggaccctacccgagcccccgagccatggccgagagaaagcaatccgggaaggcggcagaggacgaagaggtccctgctttttttaaaaacctgggctccggcagccccaagccccggcagaaattctgtggcatgttctgcccggtggaagggtcctcggagaacaagaccatcgacttcgactcgctgtcggtgggccggggctcggggcaggtggtggctcagcagcgggacgtcgcccacttgggcccggacccgcagccgccgtactcgcggcagggccggcgcgccggcgganagccatctgttgaatcgggccggaaggtggagatccggagggcctcgggcaaagaagccctgcanaacatcaacgaccanagcgatcgtcttctgatcaaaggaggtaaaattgttaatgatgaccagtcgttctatgcanacatatacatggaagatgggtttgatcaagcaaataggaaaaaatctgattgtgccaggagaantgaaaaccatcnaggcccactcccgnatggtgatccccggangaattgacntcccactcntttcaaatgcctgatcaaggnaatgactctgctgatnatttttncaagnaacaaggngncctggctggggnaaccctnnatntttgncncntttnttcttaaacctgggaaaacctnntcntnctttaacanngaagnaaatggccaaaaaaaanccgnt

SEQ ID NO: 150 - DNA, 1173 bp, Homo Sapiens
  misc_feature (17)..(17): n is a, c, g, or t
  misc_feature (37)..(37): n is a, c, g, or t
  misc_feature (41)..(41): n is a, c, g, or t
  misc_feature (80)..(80): n is a, c, g, or t
  misc_feature (112)..(112): n is a, c, g, or t
  misc_feature (882)..(882): n is a, c, g, or t
  misc_feature (914)..(914): n is a, c, g, or t
  misc_feature (917)..(917): n is a, c, g, or t
  misc_feature (927)..(927): n is a, c, g, or t
  misc_feature (936)..(936): n is a, c, g, or t
  misc_feature (947)..(947): n is a, c, g, or t
  misc_feature (955)..(955): n is a, c, g, or t
  misc_feature (968)..(968): n is a, c, g, or t
  misc_feature (976)..(976): n is a, c, g, or t
  misc_feature (997)..(997): n is a, c, g, or t
  misc_feature (1006)..(1006): n is a, c, g, or t
  misc_feature (1014)..(1014): n is a, c, g, or t
  misc_feature (1017)..(1017): n is a, c, g, or t
  misc_feature (1051)..(1051): n is a, c, g, or t
  misc_feature (1076)..(1076): n is a, c, g, or t
  misc_feature (1098)..(1098): n is a, c, g, or t
  misc_feature (1100)..(1100): n is a, c, g, or t
  misc_feature (1104)..(1105): n is a, c, g, or t
  misc_feature (1107)..(1107): n is a, c, g, or t
  misc_feature (1110)..(1110): n is a, c, g, or t
  misc_feature (1114)..(1114): n is a, c, g, or t
  misc_feature (1132)..(1132): n is a, c, g, or t
  misc_feature (1134)..(1135): n is a, c, g, or t
  misc_feature (1142)..(1142): n is a, c, g, or t
  misc_feature (1145)..(1145): n is a, c, g, or t
  misc_feature (1147)..(1147): n is a, c, g, or t
  misc_feature (1152)..(1152): n is a, c, g, or t
  misc_feature (1161)..(1161): n is a, c, g, or t
gattagaagagaattanctatgagtaggatcgcatcnctcntcatccactcacggatcctatttagggtggacactatantaatcgtcgacccacgtcgtccgcccacgcgntccgcccacgcgttccggcggaggctggtggcccctgggcgagatgccgtacgccaaccagcctaccgtgcggatcacggagctcactgacgagaatgtcaagttcatcatcgagaacaccgacctggcggtggccaattcgattcggagggtcttcatcgctgaggttcccataatagccattgactgggttcagattgatgccaattcctcagttcttcatgatgaattcattgctcacaggcttggattaattcccctcattagtgatgacattgtggacaagctgcagtactctcgggactgcacatgtgaggagttctgccccgagtgctcggtggagttcaccctcgatgtgcggtgcaatgaagaccagacgcgacatgtcacgtctcgagacctcatctccaacagcccccgggtcattccggtgacatcccggaaccgagataatgaccccaatgactacgtggagcaggatgacatcctcatcgtcaagttgagaaagggccaggagctgagacttcgagcctatgccaaaaagggctttggcaaggagcatgccaagtggaaccctactgcaggggtggcttttgaatacgatccagacaatgccctgaggcacacagtgtaccccaagcccgaggaatggccaaagagtgagtactcggagctggatgaggatgagtcgcaggctccctatgaccccaacggcaagccagaaggttttactacaatgtggagtcctgtggctctctgcgtcctgaaancattgtcctgtcagcccctctcaggattgaanaanaaaactgaantgattttanaaactcaattnaagccccnaaaatcccaaaantgatgtgncttaaccataaatttaactgnaagctttgncttgcttncancaaaaaacgggaaatttcaggcccaccacctggnaaaaggggggttttccctttcaaanttctttcccgttttcctgaaantntaanncnacnggtnggtttaaactttcttggncnnggaaatncantnaccanctaaaaatngggtcataaaaa

SEQ ID NO: 151 - DNA, 801 bp, Homo Sapiens
  misc_feature (1)..(3): n is a, c, g, or t
  misc_feature (7)..(7): n is a, c, g, or t
  misc_feature (15)..(15): n is a, c, g, or t
  misc_feature (19)..(19): n is a, c, g, or t
  misc_feature (44)..(44): n is a, c, g, or t
  misc_feature (54)..(54): n is a, c, g, or t
  misc_feature (61)..(61): n is a, c, g, or t
  misc_feature (67)..(67): n is a, c, g, or t
  misc_feature (80)..(80): n is a, c, g, or t
  misc_feature (87)..(87): n is a, c, g, or t
  misc_feature (92)..(92): n is a, c, g, or t
  misc_feature (94)..(94): n is a, c, g, or t
  misc_feature (126)..(126): n is a, c, g, or t
  misc_feature (226)..(226): n is a, c, g, or t
  misc_feature (228)..(228): n is a, c, g, or t
  misc_feature (233)..(233): n is a, c, g, or t
  misc_feature (295)..(295): n is a, c, g, or t
  misc_feature (312)..(312): n is a, c, g, or t
  misc_feature (377)..(377): n is a, c, g, or t
  misc_feature (565)..(565): n is a, c, g, or t
  misc_feature (603)..(603): n is a, c, g, or t
  misc_feature (614)..(614): n is a, c, g, or t
  misc_feature (617)..(617): n is a, c, g, or t
  misc_feature (619)..(619): n is a, c, g, or t
  misc_feature (621)..(621): n is a, c, g, or t
  misc_feature (627)..(627): n is a, c, g, or t
  misc_feature (636)..(636): n is a, c, g, or t
  misc_feature (639)..(639): n is a, c, g, or t
  misc_feature (662)..(662): n is a, c, g, or t
  misc_feature (678)..(678): n is a, c, g, or t
  misc_feature (681)..(681): n is a, c, g, or t
  misc_feature (683)..(684): n is a, c, g, or t
  misc_feature (686)..(686): n is a, c, g, or t
  misc_feature (695)..(695): n is a, c, g, or t
  misc_feature (701)..(702): n is a, c, g, or t
  misc_feature (723)..(723): n is a, c, g, or t
  misc_feature (731)..(732): n is a, c, g, or t
  misc_feature (734)..(734): n is a, c, g, or t
  misc_feature (750)..(750): n is a, c, g, or t
  misc_feature (756)..(756): n is a, c, g, or t
  misc_feature (768)..(769): n is a, c, g, or t
  misc_feature (795)..(795): n is a, c, g, or t
nnnaatngagaaatnactntgagaggatcgcatctccctctccntctcgggatnttatttnggtganactatataatcgncgacccncgcgntncgaacagcgggaacgctacaagagcgatccanggcccataagagcaacagcacccatgtggcgctgcagccgaatcatgcacatgcagcgagagctccaccccacccttctgtcttccctggaaggcatcgncnatcanatggtctggttcagagaaaattggcatgaagaggttctcaggcagctccaacagggcctggngaaatgttactccgtgncgtttgagaaaagtggagcggtgtccgatgctaaaatcaccccccacactctcaattttgtgaanaagttggtgagcacgtttggggtgggcctggagaatgtgtccaacgtctcgaccatgttctccagcgcagcctctgagtctctggcccggcgggcgcaggccactgcacaagaccctgtctttcagaaactgaaaggccagttcacgacggattttgacttcagcgttccaggatccatgaagcttcntaatcttatttctaagtttgaaaaagtggatcaaaatnttggaggccangancnancaactncccaaattnttnctcataaaagaaaaagtgccggntcttgaatcaattttntcngnncnagacagctnaaagtnnaaaattcctggggagttttcntgatgccnnancccaaacgcattattnacttcnagaattgccccnntttcatgcccccgggttaaaaaattnttgcat

SEQ ID NO: 152 - DNA, 1179 bp, Homo Sapiens
  misc_feature (3)..(3): n is a, c, g, or t
  misc_feature (5)..(6): n is a, c, g, or t
  misc_feature (783)..(783): n is a, c, g, or t
  misc_feature (790)..(790): n is a, c, g, or t
  misc_feature (846)..(846): n is a, c, g, or t
  misc_feature (912)..(912): n is a, c, g, or t
  misc_feature (934)..(934): n is a, c, g, or t
  misc_feature (937)..(937): n is a, c, g, or t
  misc_feature (942)..(942): n is a, c, g, or t
  misc_feature (947)..(947): n is a, c, g, or t
  misc_feature (973)..(973): n is a, c, g, or t
  misc_feature (975)..(975): n is a, c, g, or t
  misc_feature (979)..(979): n is a, c, g, or t
  misc_feature (982)..(982): n is a, c, g, or t
  misc_feature (994)..(995): n is a, c, g, or t
  misc_feature (1007)..(1007): n is a, c, g, or t
  misc_feature (1009)..(1009): n is a, c, g, or t
  misc_feature (1018)..(1018): n is a, c, g, or t
  misc_feature (1023)..(1023): n is a, c, g, or t
  misc_feature (1031)..(1031): n is a, c, g, or t
  misc_feature (1036)..(1036): n is a, c, g, or t
  misc_feature (1049)..(1049): n is a, c, g, or t
  misc_feature (1074)..(1074): n is a, c, g, or t
  misc_feature (1083)..(1084): n is a, c, g, or t
  misc_feature (1087)..(1087): n is a, c, g, or t
  misc_feature (1089)..(1089): n is a, c, g, or t
  misc_feature (1091)..(1091): n is a, c, g, or t
  misc_feature (1094)..(1094): n is a, c, g, or t
  misc_feature (1106)..(1106): n is a, c, g, or t
  misc_feature (1108)..(1108): n is a, c, g, or t
  misc_feature (1111)..(1111): n is a, c, g, or t
  misc_feature (1113)..(1113): n is a, c, g, or t
  misc_feature (1121)..(1122): n is a, c, g, or t
  misc_feature (1128)..(1128): n is a, c, g, or t
  misc_feature (1140)..(1140): n is a, c, g, or t
  misc_feature (1142)..(1142): n is a, c, g, or t
  misc_feature (1150)..(1150): n is a, c, g, or t
  misc_feature (1154)..(1154): n is a, c, g, or t
  misc_feature (1160)..(1160): n is a, c, g, or t
  misc_feature (1171)..(1171): n is a, c, g, or t
gantnngagaaattactatgagaggatcgcatcaccatcaccatcacggatcctatttaggtgacactatagaatcgtcgacccacgcgtccgggctcggcggcagccgggctcggagtggacgtgccactatggggtcgtccaagaagcatcgcggagagaaggaggcggccgggacgacggcggcggccggcaccgggggtgccaccgagcagccgccgcggcaccgggaacacaaaaaacacaagcaccggagtggcggcagtggcggtagcggtggcgaacgacggaagcggagccgggaacgtgggggcgagcgcgggagcgggcggcgcggggccgaagctgaggcccggagcagcacgcacgggcgggagcgcagccaggcagagccctccgagcggcgcgtgaagcgggagaagcgcgatgacggctacgaggccgctgccagctccaaaactagctcaggcgatgcctcctcactcagcatcgaggagactaacaaactccgggcaaagttggggctgaaacccttggaggttaatgccatcaagaaggaggcgggcaccaaggaggagcccgtgacagctgatgtcatcaaccctatggccttgcgacagcgagaggagctgcgggagaagctggcggctgccaaggagaagcgcctgctgaaccaaaagctggggaagataaagaccctaggagaggatgacccctggctggacgacactgcagcctggatcgagaggagccggcagctgcagaaggagaaggacctggcanagaaganggccaagttactggaggagatggaccaagagtttggtgtcagcactctggtggagnaagagttcgggcaaaagcggcaggacctgtacagtgccccgggaactgcagggcctcactgtggancatgccattgattccttccganaanggganacatngattcttaccctcaaggacaaaggcntncttncangaagaagaagannttgcttgttaancnttaaacctnggtgnataaggancgggncaaaaaaaaattnttgaacttccgaaaaaaaaaacctnaaatacctnnccntntnccnaagaaaaaaaancntgnanaaaccttnncccaanaaaaacctcccntnttttcttnttcnaaattntaacaaaaaanttttaaag

SEQ ID NO: 153 - DNA, 1179 bp, Homo Sapiens
  misc_feature (16)..(16): n is a, c, g, or t
  misc_feature (37)..(37): n is a, c, g, or t
  misc_feature (73)..(73): n is a, c, g, or t
  misc_feature (87)..(87): n is a, c, g, or t
  misc_feature (925)..(925): n is a, c, g, or t
  misc_feature (927)..(927): n is a, c, g, or t
  misc_feature (971)..(971): n is a, c, g, or t
  misc_feature (984)..(984): n is a, c, g, or t
  misc_feature (1023)..(1023): n is a, c, g, or t
  misc_feature (1031)..(1031): n is a, c, g, or t
  misc_feature (1048)..(1048): n is a, c, g, or t
  misc_feature (1057)..(1057): n is a, c, g, or t
  misc_feature (1063)..(1063): n is a, c, g, or t
  misc_feature (1081)..(1081): n is a, c, g, or t
  misc_feature (1087)..(1087): n is a, c, g, or t
  misc_feature (1094)..(1094): n is a, c, g, or t
  misc_feature (1097)..(1097): n is a, c, g, or t
  misc_feature (1106)..(1108): n is a, c, g, or t
  misc_feature (1126)..(1127): n is a, c, g, or t
  misc_feature (1129)..(1129): n is a, c, g, or t
  misc_feature (1139)..(1139): n is a, c, g, or t
  misc_feature (1143)..(1143): n is a, c, g, or t
  misc_feature (1149)..(1149): n is a, c, g, or t
  misc_feature (1155)..(1155): n is a, c, g, or t
  misc_feature (1162)..(1162): n is a, c, g, or t
  misc_feature (1164)..(1165): n is a, c, g, or t
  misc_feature (1174)..(1174): n is a, c, g, or t
gattagagagaattantatgagaggatcgcatccccntcatccatcacggatcctatttaggtgacactatantaatcgtcgacccncgcgtccgtcttcaatgagcagaaatatgctgatgcggtgaagaacttcttggatctgatttcgtcctcggggagaagagaccccaagagtgttgagcagcccatcgtgcttaaagaagggttcatgatcaagagggcccaaggacggaagcgctttgggatgaagaattttaagaagagatggtttcgcttgaccaaccatgaatttacctaccacaaaagcaaaggggaccagcctctctacagcattcccatcgagaacatcctggcagtggagaagctggaggaggagtctttcaaaatgaaaaacatgttccaggtcatccagccagagcgtgcgctgtacatccaggccaacaactgcgtggaggccaaggactggatcgacattctcaccaaagtgagccagtgcaaccagaagcgcctcaccgtctaccacccgtccgcctacctgagcggccactggctgtgctgtagggcgccatccgactcggctccgggctgctcgccctgcactggcggcctcccagccaacatccagctggacattgatggggaccgtgagacggagcgtatctactccctcttcaacttgtacatgagcaagctggagaagatgcaggaggcctgtgggagcaaatctgtgtatgacggcccggagcaggaggagtattcgacgttcgtcattgacgacccccaggagacctacaagacgctaaagcaagtcatcgctggggttggggctttggagcaggagcacgcccagtataaagagggacaagttcaagaagacgaaaatatggaagccaggagcaccccatcggagacaagagcttcnanaactacatccggcagcagtccgagacctccactcattccatttnaagtctgcgggangcccccagtggcgccagcaagctgcccatgcaaaagccncacccttngggaggaaaaaaaaaangaaaaaacncaaaanccggcaaaatgaaatgcncccccntccccgnccnaaaaaaaannnggggctggggttttcccnntnccaaaaacgnttgncaccancgcccncccctcncnnaaaaacccncttgg

SEQ ID NO: 154 - DNA, 1179 bp, Homo Sapiens
  misc_feature (866)..(866): n is a, c, g, or t
  misc_feature (907)..(907): n is a, c, g, or t
  misc_feature (933)..(933): n is a, c, g, or t
  misc_feature (937)..(937): n is a, c, g, or t
  misc_feature (949)..(949): n is a, c, g, or t
  misc_feature (959)..(959): n is a, c, g, or t
  misc_feature (965)..(965): n is a, c, g, or t
  misc_feature (970)..(970): n is a, c, g, or t
  misc_feature (981)..(981): n is a, c, g, or t
  misc_feature (983)..(983): n is a, c, g, or t
  misc_feature (986)..(986): n is a, c, g, or t
  misc_feature (1001)..(1001): n is a, c, g, or t
  misc_feature (1005)..(1005): n is a, c, g, or t
  misc_feature (1015)..(1015): n is a, c, g, or t
  misc_feature (1023)..(1024): n is a, c, g, or t
  misc_feature (1027)..(1027): n is a, c, g, or t
  misc_feature (1041)..(1041): n is a, c, g, or t
  misc_feature (1051)..(1051): n is a, c, g, or t
  misc_feature (1064)..(1064): n is a, c, g, or t
  misc_feature (1067)..(1067): n is a, c, g, or t
  misc_feature (1091)..(1091): n is a, c, g, or t
  misc_feature (1099)..(1099): n is a, c, g, or t
  misc_feature (1104)..(1104): n is a, c, g, or t
  misc_feature (1116)..(1116): n is a, c, g, or t
  misc_feature (1118)..(1118): n is a, c, g, or t
  misc_feature (1122)..(1122): n is a, c, g, or t
  misc_feature (1129)..(1129): n is a, c, g, or t
  misc_feature (1133)..(1133): n is a, c, g, or t
  misc_feature (1140)..(1140): n is a, c, g, or t
  misc_feature (1142)..(1143): n is a, c, g, or t
  misc_feature (1155)..(1155): n is a, c, g, or t
  misc_feature (1161)..(1161): n is a, c, g, or t
  misc_feature (1166)..(1166): n is a, c, g, or t
  misc_feature (1178)..(1178): n is a, c, g, or t
tagagaaattactatgagaggatcgcatcaccatcaccatcacggatcctatttaggtgacactatagaatcgtcgacccacgcgtccggtggagcgatgggaggccttgagaagaagaagtatgaacgaggctcggccaccaactacatcacccggaacaaagcccggaagaagctccagctgagcttggctgactttaggcggctgtgcattctgaagggcatttatccccatgaacccaaacacaagaagaaggttaacaagggttctacagcagcccgaacgttttaccttatcaaagacatcaggtttctcctccacgaacccattgtcaacaagttccgtgaatacaaggtgttcgtccggaagctccggaaggcttatgggaagagcgagtggaacactgtagagcgtttaaaggacaataagcccaactacaaactcgaccacatcatcaaggaacggtatcccacgttcatcgatgccctgcgggacctggacgatgccctctccatgtgcttcctgttttccaccttcccgcggactggcaagtgccacgtgcagaccattcagctgtgccgccggctcactgtggagttcatgcactacattatcgctgcccgtgccctgcgcaaggtcttcctgtccatcaaaggcatttactaccaggccgaggtactggggcagcccatcgtgtggatcactccctatgccttctcccatgaccacccgacagacgtggactacagggtcatggccaccttcaccgagttctacaccacgctgctgggctttgtcaacttccgcctttaccagttgctcaacctccactatcccccgaagctcgagggtcaggcccaagcanaggcaaaggccggtgagggcacctacgcgttggactccganagttgtatggagaaactggcagcccntcantgccagcctggncccgcgtggnggtgcntgccncaaaagaagangnccnaggtggatgaatttncccnccgatggggnaaatgtcnnccncaggagaaaaaccnccaggaaagnacctggaggcccnagnaaaaaccccaaaaaacttttttgngggccttnaattntttctgaaaccnanaggngccccgngagncctggcntnntctcagaatttngggggnaaatntcctgggaaaant

SEQ ID NO: 155 - DNA, 1182 bp, Homo Sapiens
  misc_feature (952)..(952): n is a, c, g, or t
  misc_feature (961)..(961): n is a, c, g, or t
  misc_feature (963)..(963): n is a, c, g, or t
  misc_feature (965)..(965): n is a, c, g, or t
  misc_feature (975)..(975): n is a, c, g, or t
  misc_feature (978)..(978): n is a, c, g, or t
  misc_feature (989)..(989): n is a, c, g, or t
  misc_feature (998)..(998): n is a, c, g, or t
  misc_feature (1024)..(1024): n is a, c, g, or t
  misc_feature (1042)..(1042): n is a, c, g, or t
  misc_feature (1050)..(1050): n is a, c, g, or t
  misc_feature (1055)..(1055): n is a, c, g, or t
  misc_feature (1058)..(1058): n is a, c, g, or t
  misc_feature (1060)..(1060): n is a, c, g, or t
  misc_feature (1064)..(1064): n is a, c, g, or t
  misc_feature (1074)..(1074): n is a, c, g, or t
  misc_feature (1085)..(1086): n is a, c, g, or t
  misc_feature (1091)..(1091): n is a, c, g, or t
  misc_feature (1095)..(1095): n is a, c, g, or t
  misc_feature (1108)..(1108): n is a, c, g, or t
  misc_feature (1112)..(1112): n is a, c, g, or t
  misc_feature (1114)..(1114): n is a, c, g, or t
  misc_feature (1117)..(1117): n is a, c, g, or t
  misc_feature (1119)..(1119): n is a, c, g, or t
  misc_feature (1129)..(1129): n is a, c, g, or t
  misc_feature (1138)..(1138): n is a, c, g, or t
  misc_feature (1140)..(1140): n is a, c, g, or t
  misc_feature (1151)..(1151): n is a, c, g, or t
  misc_feature (1157)..(1157): n is a, c, g, or t
  misc_feature (1167)..(1167): n is a, c, g, or t
  misc_feature (1174)..(1174): n is a, c, g, or t
  misc_feature (1178)..(1178): n is a, c, g, or t
aatagagaaattactatgagaggatcgcatcaccatcaccatcacggatcctatttaggtgacactatagaatcgtcgacccacgcgtccgcaacaggactgaacagggagccaactgtttctttgaacagtaaatcaggaacaccaatggaccaaaatgaacacagtcactggggaccacatgcaaagggccaatgtgccagcagatctgagctgagaatcatcctggtgggcaaaacaggaactggcaaaagtgctgcagggaacagcatcctcaggaagcaagcatttgaatcgaagctgggttcccagaccttgactaagacttgcagcaaaagtcagggaagctggggaaatagagagattgtcattattgacacaccagatatgttttcttggaaggaccactgtgaagctctgtacaaagaggtgcagaggtgctacttgctgtctgcaccaggaccccatgtgctgctcctggtgactcagctgggccgctatacctcacaggaccagcaggctgcacagagggtgaaggagatctttggagaggatgccatgggacacacaattgtcctctttacccacaaggaagacctcaatggtggctccctgatggattacatgcacgactcagataacaaagccctaagcaagctggtggcagcatgtggtgggcgaatctgtgcctttaataaccgtgctgaagggagcaatcaggatgaccaagtgaaggaactaatggactgtattgaggatctgttgatggagaaaaatggtgatcactataccaatgggttgtacagcctaatacagaggtctaaatgtggacctgtgggatcagatgaaagagtaaaggaattcaaacagagccttataaagtacatggaaactcaaagaagttacacagccttggctgaagcaaactgcctaaaaggagccttaatcaaancacaactgngngntttattttgnatncagttgtttcncaaattganattctgtggctttgcatactgcacancatgggcaatttgtttgntgcttacncttanaangngcanttatctgcanttgctgttttnnacccnaaanttaatgaattttnaaancnttntnaaactaaacncaaaacccnangttaaattacnatcccnttttttttancccttcntttngggg

SEQ ID NO: 156 - DNA, 1067 bp, Homo Sapiens
  misc_feature (804)..(804): n is a, c, g, or t
  misc_feature (829)..(829): n is a, c, g, or t
  misc_feature (850)..(850): n is a, c, g, or t
  misc_feature (893)..(893): n is a, c, g, or t
  misc_feature (903)..(903): n is a, c, g, or t
  misc_feature (916)..(916): n is a, c, g, or t
  misc_feature (935)..(935): n is a, c, g, or t
  misc_feature (952)..(952): n is a, c, g, or t
  misc_feature (963)..(963): n is a, c, g, or t
  misc_feature (967)..(967): n is a, c, g, or t
  misc_feature (971)..(971): n is a, c, g, or t
  misc_feature (975)..(975): n is a, c, g, or t
  misc_feature (978)..(978): n is a, c, g, or t
  misc_feature (1010)..(1010): n is a, c, g, or t
  misc_feature (1029)..(1029): n is a, c, g, or t
  misc_feature (1031)..(1031): n is a, c, g, or t
  misc_feature (1036)..(1036): n is a, c, g, or t
  misc_feature (1040)..(1040): n is a, c, g, or t
  misc_feature (1044)..(1044): n is a, c, g, or t
  misc_feature (1052)..(1052): n is a, c, g, or t
  misc_feature (1056)..(1056): n is a, c, g, or t
  misc_feature (1058)..(1058): n is a, c, g, or t
  misc_feature (1060)..(1060): n is a, c, g, or t
  misc_feature (1062)..(1062): n is a, c, g, or t
agagaaattactatgagaggatcgcatcaccatcaccatcacggatcctatttaggtgacactatagaatcgtcgacccacgcgtccgcccacgcgtccgaaagaatcaaaggccgaacaagccgaaagcaagagggtgcccctgccagagggctgcccctcaggcgctgcctccgaccttcagagtaagcacctgccaaaaacggccaagccagcctcgcaagaacatgttcggtgttccgccattgggacaggggagtcccctaaggaaagcgctcagctctcaggggcctctccaaaagagagtcctagcagaggccctgccccgccgcaggagaacaaagttgtacagcccctgaaaaagatgtcacagaaaaacagcctgcagggcgtccccccggccactcctcccctgctgtctacagctttccccgtggaagagaggcctgccttggatttcaagagcgagggctcttcccaaagcctggaggaagcgcacctggtcaaggcccagtttatcccggggcagcagcccagtgtcaggctccaccggggccacaggaacatgggcgtcgtgaagaactccagcctgaagcaccgcggcccagccctccaggggctggagaacggcttgcccaccgtcagggagaaaacgcgggccgggagcaagaagtgtcgcttcccagatgacttggatacaaataagaaactcaagaaagcctcctccaaggggaggaagagtgggggcgggcccgaggctggtgttcccggcaggcccgcgggcgggggccacagggcggggancagggcgcatggccacggacgggangcggtggtggccaaacctaancacaagcgaactgactaccgggcggtggaagtcctcggccganatttcctacnaaaaggccctgangaagggcccggcccggtcnccgggaaaatgtggggnttgtaccccgngccntgtncttntgncttaagccagcccttaagcctaagtgggtagngaactccaaataatccggncnaaggngaantccntggttccncttncncngnggggg

SEQ ID NO: 157 - DNA, 1017 bp, Homo Sapiens
  misc_feature (773)..(773): n is a, c, g, or t
  misc_feature (791)..(791): n is a, c, g, or t
  misc_feature (826)..(826): n is a, c, g, or t
  misc_feature (855)..(855): n is a, c, g, or t
  misc_feature (861)..(861): n is a, c, g, or t
  misc_feature (870)..(870): n is a, c, g, or t
  misc_feature (883)..(883): n is a, c, g, or t
  misc_feature (891)..(891): n is a, c, g, or t
  misc_feature (896)..(896): n is a, c, g, or t
  misc_feature (900)..(900): n is a, c, g, or t
  misc_feature (903)..(903): n is a, c, g, or t
  misc_feature (914)..(914): n is a, c, g, or t
  misc_feature (920)..(920): n is a, c, g, or t
  misc_feature (938)..(938): n is a, c, g, or t
  misc_feature (958)..(959): n is a, c, g, or t
  misc_feature (966)..(966): n is a, c, g, or t
  misc_feature (969)..(970): n is a, c, g, or t
  misc_feature (986)..(986): n is a, c, g, or t
  misc_feature (989)..(991): n is a, c, g, or t
  misc_feature (994)..(995): n is a, c, g, or t
  misc_feature (1005)..(1005): n is a, c, g, or t
  misc_feature (1009)..(1009): n is a, c, g, or t
  misc_feature (1016)..(1017): n is a, c, g, or t
aattagagaaattactatgagaggatcgcatcaccatcaccatcacggatcctatttaggtgacactatagaatcgtcgacccacgcgtccggagaaggctcatccacctgcagacatggggcgcagaaagtcaaaacgaaagccgcctcccaagaagaagatgacaggcaccctcgagacccagttcacctgccccttctgcaaccacgagaaatcctgtgatgtgaaaatggaccgtgcccgcaacaccggagtcatctcttgtaccgtgtgcctagaggaattccagacgcccataacgtatctgtcagaacccgtggatgtgtacagtgattggatagacgcctgcgaggcggccaatcagtagcgacacagaggacccgccccctgagcagccccgcgtactgtggatccagctgttcggttctggtccagagacattccaggggtccagggtgtgagtcctgggctgtcacagccgtgtgtgtgtgtgtgtgtgtgtgtgtgtgtgtgtgtgtgtgtgtgtagtgggtgtgcgtgtgggtgtgggtgtgagtgagtgtgggtgtgtgtggctgcacgtgtcactggggtggccgtgagtgtgtgctcacaggtacgcggtggtgtcgggttcctgggcctgaggggcctgaactgatctcacttggctccgaaagcctttgctgtgttccctgcagcccctggccccccagccttggggctctggctccccccggcggaattgggggactgtttcctgacatcctgnacaagggaagcccactanaggctggaacaggacctctccagcctcctcaccancaccgtgcccatctcaactggacttcccnccctcnttctccacnttctagtgcccgnggccgggnattcnaaanccnccgttccccangtcccntgggctgggccctgaaanggaacccccccccctccccnngggtaancannaaaccccgtttcatgntcnnnttnnttttgaaaanaaancaagggnn

SEQ ID NO: 158 - DNA, 843 bp, Homo Sapiens
atgagaggtcgcatcaccatcaccatcacggatcctatttaggtgacactatagaatcgtcgacccacgcgtccggaggcggcggcggcggcggcgggagcgggagcgggcggcgagtggggagcggggccgggagtggagcagccgccgcggcgggactggaccgagcctcgccggcgcgcacctgcccgcagcgcccgcggagcgcgcagcgcggcccgagcgcgacgacctgccgagcggcggccgaggcggcggtgtgggcgcgtcaggccgcgacgagggcgctgagacaaatttacatgtattggagaccagaccagaagcccttctgaattaagatctcacattcttgaaggtggcattgaagagcactaagatcggaagatgagtgagcttgaccagttacggcaggaggccgagcaacttaagaaccagattcgagacgccaggaaagcatgtgcagatgcaactctctctcagatcacaaacaacatcgacccagtgggaagaatccaaatgcgcacgaggaggacactgcgggggcacctggccaagatctacgccatgcactggggcacagactccaggcttctcgtcagtgcctcgcaggatggtaaacttatcatctgggacagctacaccaccaacaaggtccacgccatccctctgcgctcctcctgggtcatgacctgtgcatatgccccttctgggaactatgtggcctgcggtggcctggataacatttgctccatttacaatctgaaaactcgtgaggggaacgtgcgcgtgagtcgtgagctggcagacacacaaggttacctgtcctgctgccgattcctg

SEQ ID NO: 159 - DNA, 402 bp, Homo Sapiens
aatagagaaattaactatgagaggatcgcatcaccatcaccatcacggatcctatttaggtgacactatagaatcgtcgacccacgcgtccgccctgctgtcccagaaccagggaggcaagaccttcattgtgggagaccagatctccttcgctgactacaacctgctggacttgctgctgatccatgaggtcctagcccctggctgcctggatgcgttccccctgctctcagcatatgtggggcgcctcagtgcccggcccaagctcaaggccttcctggcctcccctgagtacgtgaacctccccatcaatggcaacgggaaacagtgagggttggggggactctgagcgggaggcagagtttgccttcctttctccaggaccaataaaatttctaagag

SEQ ID NO: 160 - DNA, 938 bp, Homo Sapiens
actatgagaggtcgcatcaccatcaccatcacggatcctatttaggtgacactatagaatcgtcgacccacgcgtccgtttcaaagcccaagtataaccacattttgaaaccagaagactgtctctctgaaccgtgcactatattgcagttggacatgagaaccgtgcaaatttctgatctagagaccctgaggggcgagctgcgcttcgacatcaggaaggcggggaccctgcacggcttcacggcctggtttagcgtccacttccagagcctgcaggaggggcagccgccgcaggtgctcagcaccgggcccttccaccccaccacacactggaagcagacgctgttcatgatggacgacccagtccctgtccatacaggagacgtggtcacgggttcagttgtgttgcagagaaacccagtgtggagaaggcacatgtctgtggctctgagctgggctgtcacttccagacaagaccccacatctcaaaaagttggagaaaaagtcttccccatctggagatgacagttgatgctttatttggaaagcagtgtgcatatcttgaggggtgatgaacacaagcaaaccaagttgcacctggcttctgcacactcctgcgaaagtcggtgaacattcactccacattgacccctccctagcctggcaggtgacgtcagggtccttcacagacaaacacgcttgggctcggcaggagctgccgtggccacccccgctgcccagtgtctgccctctagaagtaggctgtgtttccaggtgttcacccgtggtgcccacagtgccgacccgtggctgggtcggagctccatgttcctaagctaggtctaggtctacactcctaggacgcacgcatatcagcccgtgtaccctgtgacagtgactgtccccacctcctgtgttagtggtgcccttactgcc

SEQ ID NO: 161 - DNA, 1062 bp, Homo Sapiens
  misc_feature (799)..(799): n is a, c, g, or t
  misc_feature (832)..(832): n is a, c, g, or t
  misc_feature (841)..(841): n is a, c, g, or t
  misc_feature (863)..(863): n is a, c, g, or t
  misc_feature (883)..(883): n is a, c, g, or t
  misc_feature (905)..(905): n is a, c, g, or t
  misc_feature (907)..(907): n is a, c, g, or t
  misc_feature (926)..(926): n is a, c, g, or t
  misc_feature (944)..(944): n is a, c, g, or t
  misc_feature (969)..(969): n is a, c, g, or t
  misc_feature (981)..(981): n is a, c, g, or t
  misc_feature (995)..(995): n is a, c, g, or t
  misc_feature (999)..(999): n is a, c, g, or t
  misc_feature (1004)..(1004): n is a, c, g, or t
  misc_feature (1009)..(1009): n is a, c, g, or t
  misc_feature (1011)..(1011): n is a, c, g, or t
  misc_feature (1018)..(1018): n is a, c, g, or t
  misc_feature (1021)..(1021): n is a, c, g, or t
  misc_feature (1024)..(1024): n is a, c, g, or t
  misc_feature (1040)..(1041): n is a, c, g, or t
  misc_feature (1046)..(1047): n is a, c, g, or t
  misc_feature (1056)..(1056): n is a, c, g, or t
  misc_feature (1059)..(1060): n is a, c, g, or t
gagaaattactatgagaggatcgcatcaccatcaccatcacggatcctatttaggtgacactatagaatcgtcgacccacgcgtccggcaagctatatctatgttcaatggccagctgctatttgatagaccaatgcacgtcaagatggatgagagggccttaccaaaaggagatttcttccctcctgagcgtccacaacaacttccccatggccttggtggtattggcatggggttaggaccaggagggcaacccattgatgccaatcacctgaataaaggcatcggaatgggaaacataggtcccgcaggaatgggaatggaaggcataggatttggaataaataaaatgggaggaatggaggggccctttggtggtggtatggaaaacatgggtcgatttggatctgggatgaacatgggcaggataaatgaaatcctaagtaatgcactgaagagaggagagatcattgcaaagcagggaggaggtggaggtggaggaagcgtccctgggatcgagaggatgggtcctggcattgaccgcctcgggggtgccggcatggagcgcatgggcgcgggcctgggccacggcatggatcgcgtgggctccgagatcgagcgcatgggcctggtcatggaccgcatgggctccgtggagcgcatgggctccggcattgagcgcatgggcccgctgggcctcgaccacatggcctccagcattgagcgcatgggccagaccatggagcgcattggctctggcgtggagcgcatgggtgccggcatgggcttcggccttgancgcatggccgctcccatcgaccgtgtgggccanaccattgancgcatgggcctctggcgtggancgcatgggccctgcccatcnagcgcatgggcctgaacatggnancccatggtgccccccaggnatgggaacctggccctgnaaccccaatgggccccccgtgatgnatcccatggccncccggccctggaancgcnagggnccccnanaatctgnaancgnatgggccctgaaaccnnatggnnccccaacanccnnca

SEQ ID NO: 162 - DNA, 1148 bp, Homo Sapiens
  misc_feature (9)..(9): n is a, c, g, or t
  misc_feature (13)..(13): n is a, c, g, or t
  misc_feature (891)..(892): n is a, c, g, or t
  misc_feature (901)..(901): n is a, c, g, or t
  misc_feature (907)..(907): n is a, c, g, or t
  misc_feature (912)..(912): n is a, c, g, or t
  misc_feature (926)..(926): n is a, c, g, or t
  misc_feature (931)..(931): n is a, c, g, or t
  misc_feature (934)..(934): n is a, c, g, or t
  misc_feature (948)..(949): n is a, c, g, or t
  misc_feature (960)..(960): n is a, c, g, or t
  misc_feature (972)..(972): n is a, c, g, or t
  misc_feature (975)..(975): n is a, c, g, or t
  misc_feature (1009)..(1009): n is a, c, g, or t
  misc_feature (1018)..(1018): n is a, c, g, or t
  misc_feature (1025)..(1025): n is a, c, g, or t
  misc_feature (1032)..(1032): n is a, c, g, or t
  misc_feature (1034)..(1034): n is a, c, g, or t
  misc_feature (1036)..(1036): n is a, c, g, or t
  misc_feature (1040)..(1040): n is a, c, g, or t
  misc_feature (1062)..(1063): n is a, c, g, or t
  misc_feature (1065)..(1065): n is a, c, g, or t
  misc_feature (1073)..(1074): n is a, c, g, or t
  misc_feature (1086)..(1086): n is a, c, g, or t
  misc_feature (1089)..(1090): n is a, c, g, or t
  misc_feature (1093)..(1093): n is a, c, g, or t
  misc_feature (1097)..(1098): n is a, c, g, or t
  misc_feature (1109)..(1109): n is a, c, g, or t
  misc_feature (1116)..(1116): n is a, c, g, or t
  misc_feature (1125)..(1126): n is a, c, g, or t
  misc_feature (1129)..(1129): n is a, c, g, or t
  misc_feature (1134)..(1134): n is a, c, g, or t
  misc_feature (1142)..(1142): n is a, c, g, or t
tagagaaanttanctatgagaggatcgcatcaccatcaccatcacggatcctatttaggtgacactatagaatcgtcgacccacgcgtccgaccgccctcacacagaagtgtttccttacattttggctgatgacaagtggcacaagctctccttagccatcagtgcttcccatttgattttacacattgactgcaataaaatttatgaaagggtagtagaaaagccctccacagacttgcctctaggcacaacattttggctaggacagagaaataatgcgcatggatattttaagggtataatgcaagatgtccaattacttgtcatgccccagggatttattgctcagtgcccagatcttaatcgcacctgtccaacttgcaatgacttccatggacttgtgcagaaaatcatggagctacaggatattttagccaaaacatcagccaagctgtctcgagctgaacagcgaatgaatagattggatcagtgctattgtgaaaggacttgcaccatgaagggaaccacctaccgagaatttgagtcctggatagacggctgtaagaactgcacatgcctgaatggaaccatccagtgtgaaactctaatctgcccaaatcctgactgcccacttaagtcggctcttgcgtatgtggatggcaaatgctgtaaggaatgcaaatcgatatgccaatttcaaggacgaacctactttgaaggagaaagaaatacagtctattcctcttctggagtatgtgttctctatgagtgcaaggaccagaccatgaaacttgttgagagttcaggctgtcccagcttttggattgtccagagtctcatcaaataacccttgtctcacagctgttgcaaagtttgtaaaggttatgannttttgttcntgaaanggcanaactggcatggaanaattnccntctgcaaaaatctnnaaggacagggnctgttttgaacntgnccaaaatggttttaaggggcccttccaaaagaanaaaggcccnacggggnaaaaacntncnatgnatgggcctgaaaggggcccccnntnacgggccnngaaaaaaaaaanggnnggnccannccccggggttnttttttnggggcctcnngcnaaacngggaaaanccccaa

SEQ ID NO: 163 - DNA, 961 bp, Homo Sapiens
  misc_feature (1)..(1): n is a, c, g, or t
  misc_feature (938)..(938): n is a, c, g, or t
natatagagaaattactatgagaggatcgcatcaccatcaccatcacggatcctatttaggtgacactatagaatcgtcgacccacgcgtccgattttgtggaggctggtgctatggcagttagaagagttttaaaaagggaccttaaacgcattgccaaagcttctggagcaactattctgtcaaccctggccaatttggaaggtgaagaaacttttgaagctgcaatgttgggacaggcagaagaagtggtacaggagagaatttgtgatgatgagctgatcttaatcaaaaatactaaggctcgtacgtctgcatcgattatcttacgtggggcaaatgatttcatgtgtgatgagatggagcgctctttacatgatgcactttgtgtagtgaagagagttttggagtcaaaatctgtggttcccggtgggggtgctgtagaagcagccctttccatataccttgaaaactatgcaaccagcatggggtctcgggaacagcttgcgattgcagagtttgcaagatcacttcttgttattcccaatacactagcagttaatgctgcccaggactccacagatctggttgcaaaattaagagcttttcataatgaggcccaggttaacccagaacgtaaaaatctaaaatggattggtcttgatttgagcaatggtaaacctcgagacaacaaacaagcaggggtgtttgaaccaaccatagttaaagttaagagtttgaaatttgcaacagaagctgcaatcaccattcttcgaattgatgatcttattaaattacatccagaaagtaaagatgataaacatggaagttatgaagatgctgttcactctggagccccttaatgattgatctgatgttcctttttatttataacaatgttaaatgcaattgtcttgtaccttgagttgagtattacncattaaagtaaagtacaagctgt

SEQ ID NO: 164 - DNA, 285 bp, Homo Sapiens
tatgagaggtcgcatcaccatcaccatcacggatcctatttaggtgacactatagaatcgtcgacccacgcgtccgcccacgcgtccgctttgtgcctgacagtggttgggtgggccaccagtaactacttcgtgggtgccattcaagagattcctaaagcgaaggagttcatggctaatttccataagaccctcattttggggaagggaaaaactctgactaatgaaacatccacgaataaggtataacttgacaactgcccttctgtgtctccttacctcaga

SEQ ID NO: 165 - DNA, 1166 bp, Homo Sapiens
  misc_feature (860)..(860): n is a, c, g, or t
  misc_feature (875)..(875): n is a, c, g, or t
  misc_feature (877)..(877): n is a, c, g, or t
  misc_feature (906)..(907): n is a, c, g, or t
  misc_feature (916)..(916): n is a, c, g, or t
  misc_feature (962)..(962): n is a, c, g, or t
  misc_feature (967)..(967): n is a, c, g, or t
  misc_feature (974)..(974): n is a, c, g, or t
  misc_feature (985)..(985): n is a, c, g, or t
  misc_feature (992)..(992): n is a, c, g, or t
  misc_feature (994)..(994): n is a, c, g, or t
  misc_feature (1001)..(1001): n is a, c, g, or t
  misc_feature (1011)..(1011): n is a, c, g, or t
  misc_feature (1019)..(1019): n is a, c, g, or t
  misc_feature (1022)..(1022): n is a, c, g, or t
  misc_feature (1033)..(1033): n is a, c, g, or t
  misc_feature (1037)..(1037): n is a, c, g, or t
  misc_feature (1060)..(1060): n is a, c, g, or t
  misc_feature (1069)..(1069): n is a, c, g, or t
  misc_feature (1072)..(1072): n is a, c, g, or t
  misc_feature (1080)..(1081): n is a, c, g, or t
  misc_feature (1090)..(1090): n is a, c, g, or t
  misc_feature (1099)..(1099): n is a, c, g, or t
  misc_feature (1101)..(1101): n is a, c, g, or t
  misc_feature (1111)..(1111): n is a, c, g, or t
  misc_feature (1113)..(1116): n is a, c, g, or t
  misc_feature (1126)..(1126): n is a, c, g, or t
  misc_feature (1135)..(1135): n is a, c, g, or t
  misc_feature (1145)..(1145): n is a, c, g, or t
  misc_feature (1149)..(1150): n is a, c, g, or t
  misc_feature (1155)..(1155): n is a, c, g, or t
  misc_feature (1157)..(1158): n is a, c, g, or t
  misc_feature (1162)..(1162): n is a, c, g, or t
  misc_feature (1166)..(1166): n is a, c, g, or t
aatagagaaattactatgagaggatcgcatcaccatcaccatcacggatcctatttaggtgacactatagaatcgtcgacccacgcgttccgcaggtgtggactcggcaagaaccagcgcaagagggaagcggagttatagctaccccggccgcggagccggctcactgcactacccccgcccccttctttcctccagacgccgaagtcgcgggcgctcatggcgggcctggaggtactgttcgcatcggcagcgccggccatcacctgcaggcaggacgcgctcgtctgcttcttgcattgggaagtggtgacacacggttactgcggcttgggtgtcggtgaccagccgggtcccaatgataagaagtcagaactgctgccagctgggtggaacaacaataaagacctgtatgtcctccggtatgagtataaggatgggtccagaaagctccttgtgaaagccatcaccgtggagagcagcatgatcctcaatgtgctggaatatggctcacagcaagtggcagacttgaccctgaacttggatgattatatcgatgcagaacacctgggtgacttccacaggacctacaagaacagtgaggagcttcggtctcgtattgtgtctggaatcatcacacctatccatgagcagtgggaaaaggctaatgtaagcagtccccaccgggagttcccccctgctaccgccagagaggtggacccactccggattcctccacaccacccacacaccagtcggcagcctccctggtgtgatcccctgggcccgtttgttgtcgggggagaagacttaaacccttttgggcctcggagaagtggcatgattgtggatcccctganatctggcttcccaanancacttattgacccttcctcaggcctcccnnaaccgactncctccaggcgctgtgcccccaggaactcgctttgacccctttgganccatngggacancccacccgganctaaccnanaacatcnccccccgccnggctacanganatgtacctgtnaagnctcaaaaatgtaaaatcccaggnttccttcanttntctggaanntgccaccgntttcccatnanaaacatgttntnnnnggttgggggnaaggaattntgcttctgtntttnnaaacngnngggnaaan

SEQ ID NO: 166 - DNA, 971 bp, Homo Sapiens
  misc_feature (1)..(1): n is a, c, g, or t
  misc_feature (901)..(901): n is a, c, g, or t
  misc_feature (927)..(927): n is a, c, g, or t
  misc_feature (948)..(948): n is a, c, g, or t
naattagagaaattactatgagaggatcgcatcaccatcaccatcacggatcctatttaggtgacactatagaatcgtcgacccacgcgtccggctgcctatttccaccaagcagccaagctcaagggaatcggggagtacgtgaacatccgcacagggatgccctgccacttgcaccccaccagctccctttttggaatgggctacaccccagattacatagtgtatcacgagttggtcatgaccaccaaggagtatatgcagtgtgtgaccgctgtggacggggagtggctggcggagctgggccccatgttctatagcgtgaaacaggcgggcaagtcacggcaggagaaccgtcgtcgggccaaagaggaagcctctgccatggaggaggagatggcgctggccgaggagcagctgcgagcccggcggcaggagcaggagaagcgcagccccctgggcagtgtcaggtctacgaagatctacactccaggccggaaagagcaaggggagcccatgacccctcgccgcacgccagcccgctttggtctgtgagctgaggctgtccccagagaggatggcagcaggtattgggtcctcagccttctggcgggagccctgaggctgcggacaaagccctttcatctgaggactttcatctgtgcatatcacggccccccagggcagttcctgctggaccagactctctggcagaggaggtggagttcttccatgcaggagcacggcatggcgggagcggggctgcagagtatccgaggtgctgccggggcagcgggaggtggctggacccatcgcatctaaaactggcccaggacacttggtgtatgcgtgacttggctgtggctgtcttttttaatccttgtgtaaagcagcaaaaaanacctaaagggaattgtaatttgggtnataattcaggatttggaaatnaaattttttatttgtaaaacatg

SEQ ID NO: 167 - DNA, 1059 bp, Homo Sapiens
  misc_feature (1)..(5): n is a, c, g, or t
  misc_feature (22)..(22): n is a, c, g, or t
  misc_feature (695)..(695): n is a, c, g, or t
  misc_feature (726)..(726): n is a, c, g, or t
  misc_feature (743)..(743): n is a, c, g, or t
  misc_feature (748)..(748): n is a, c, g, or t
  misc_feature (788)..(788): n is a, c, g, or t
  misc_feature (798)..(798): n is a, c, g, or t
  misc_feature (807)..(807): n is a, c, g, or t
  misc_feature (819)..(819): n is a, c, g, or t
  misc_feature (842)..(842): n is a, c, g, or t
  misc_feature (846)..(846): n is a, c, g, or t
  misc_feature (850)..(850): n is a, c, g, or t
  misc_feature (855)..(855): n is a, c, g, or t
  misc_feature (858)..(858): n is a, c, g, or t
  misc_feature (867)..(867): n is a, c, g, or t
  misc_feature (870)..(870): n is a, c, g, or t
  misc_feature (875)..(875): n is a, c, g, or t
  misc_feature (887)..(887): n is a, c, g, or t
  misc_feature (894)..(894): n is a, c, g, or t
  misc_feature (897)..(897): n is a, c, g, or t
  misc_feature (900)..(900): n is a, c, g, or t
  misc_feature (907)..(907): n is a, c, g, or t
  misc_feature (917)..(917): n is a, c, g, or t
  misc_feature (923)..(923): n is a, c, g, or t
  misc_feature (930)..(930): n is a, c, g, or t
  misc_feature (932)..(932): n is a, c, g, or t
  misc_feature (938)..(938): n is a, c, g, or t
  misc_feature (957)..(957): n is a, c, g, or t
  misc_feature (966)..(966): n is a, c, g, or t
  misc_feature (971)..(971): n is a, c, g, or t
  misc_feature (974)..(974): n is a, c, g, or t
  misc_feature (976)..(976): n is a, c, g, or t
  misc_feature (989)..(990): n is a, c, g, or t
  misc_feature (995)..(995): n is a, c, g, or t
  misc_feature (1004)..(1004): n is a, c, g, or t
  misc_feature (1011)..(1012): n is a, c, g, or t
  misc_feature (1017)..(1017): n is a, c, g, or t
  misc_feature (1029)..(1029): n is a, c, g, or t
  misc_feature (1035)..(1035): n is a, c, g, or t
  misc_feature (1041)..(1041): n is a, c, g, or t
  misc_feature (1046)..(1048): n is a, c, g, or t
  misc_feature (1052)..(1053): n is a, c, g, or t
  misc_feature (1056)..(1058): n is a, c, g, or t
nnnnnaattagagaaaattacnatgagaggatcgcatcaccattcaccattcacggtatcctatttaggtgacacttatagaatcgtcgacccacgcgtccggcgcgatggagccggggcgccggggggccgcggcgctgctagcgctgctgtgcgtggcctgcgcgctgcgcgccgggcgcgcccaatacgaacgctacagcttccgcagcttcccacgggacgagctgatgccgctcgagtcggcctaccggcacgcgctggacaagtacagcggcgagcactgggccgagagcgtgggctacctggagatcagcctgcggctgcaccgcttgctgcgcgacagcgaggccttctgccaccgcaactgcagcgccgcgccgcagcccgagcccgccgccggcctcgccagctatcccgagctgcgcctcttcgggggcctgctgcgccgcgcgcactgcctcaagcgctgcaagcagggcctgccagccttccgccagtcccagcccagccgcgaggtgctggcggacttccagcgccgcgagccctacaagttcctgcagttcgcttacttcaaggcaaataatctccccaaagccatcgccgctgctcacacctttctactgaagcatcctgatgacgaaatgatgaagaggaacatggcatattataagagcctgcctggtgccgaggantacattaaagacctggaaaccaagtcatatnaaaagcctgttcatccnagcantgcggggcatacaaacggtgaaaaactggaagaacatccnttcacaaaanatgggagcntggccctttccngaactttcttcaaaaccttttanagantgtnttcgnaancctgccaanggnttccnaggggaaaattnaaggaanttnaangaatttntaaccctttncaatancaagaananttaaantaaaaaattcttggaaatntcaaaaaanaaatntgngnaaaaaaaaacctnnacccnaatttatangaaggtnnttccngttttaaaaaantttttngggttnaccannnatannaannna

SEQ ID NO: 168 - DNA, 1179 bp, Homo Sapiens
  misc_feature (1)..(1): n is a, c, g, or t
  misc_feature (872)..(872): n is a, c, g, or t
  misc_feature (905)..(905): n is a, c, g, or t
  misc_feature (914)..(914): n is a, c, g, or t
  misc_feature (918)..(918): n is a, c, g, or t
  misc_feature (928)..(928): n is a, c, g, or t
  misc_feature (950)..(950): n is a, c, g, or t
  misc_feature (963)..(963): n is a, c, g, or t
  misc_feature (966)..(966): n is a, c, g, or t
  misc_feature (983)..(983): n is a, c, g, or t
  misc_feature (992)..(992): n is a, c, g, or t
  misc_feature (998)..(998): n is a, c, g, or t
  misc_feature (1009)..(1009): n is a, c, g, or t
  misc_feature (1022)..(1022): n is a, c, g, or t
  misc_feature (1025)..(1025): n is a, c, g, or t
  misc_feature (1027)..(1027): n is a, c, g, or t
  misc_feature (1030)..(1030): n is a, c, g, or t
  misc_feature (1036)..(1036): n is a, c, g, or t
  misc_feature (1067)..(1067): n is a, c, g, or t
  misc_feature (1069)..(1069): n is a, c, g, or t
  misc_feature (1075)..(1075): n is a, c, g, or t
  misc_feature (1093)..(1094): n is a, c, g, or t
  misc_feature (1099)..(1099): n is a, c, g, or t
  misc_feature (1102)..(1102): n is a, c, g, or t
  misc_feature (1122)..(1122): n is a, c, g, or t
  misc_feature (1125)..(1125): n is a, c, g, or t
  misc_feature (1127)..(1127): n is a, c, g, or t
  misc_feature (1134)..(1135): n is a, c, g, or t
  misc_feature (1139)..(1139): n is a, c, g, or t
  misc_feature (1149)..(1149): n is a, c, g, or t
  misc_feature (1175)..(1175): n is a, c, g, or t
  misc_feature (1178)..(1179): n is a, c, g, or t
naattagagaaattactatgagaggatcgcatcaccatcaccatcacggatcctatttaggtgacactatagaatcgtcgacccacgcgtccgaacggacattcgtaaagaagcgggttcttcggaaagccctcgagcatgttccaaactcggttcgcttgtggaaagcagccgttgagctggaagaacctgaagatgctagaatcatgctgagccgagctgtggagtgctgccccaccagcgtggagctctggcttgctctggcaaggctggagacctatgaaaatgcccgcaaggtcttgaacaaggcgcgggagaacattcctacagaccgacatatctggatcacggctgctaagctggaggaagccaatgggaacacgcagatggtggagaagatcatcgaccgagccatcacctcgctgcgggccaacggtgtggagatcaaccgtgagcagtggatccaggatgccgaggaatgtgacagggctgggagtgtggccacctgccaggccgtcatgcgtgccgtgattgggattgggattgaggaggaagatcggaagcatacctggatggaggatgctgacagttgtgtagcccacaatgccctggagtgtgcacgagccatctacgcctacgccctgcaggtgttccccagcaagaagagtgtgtggctgcgcgccgcgtacttcgagaagaaccatggcactcgggagtccctggaagcactcctgcagagggctgtggcccactgccccaaagcagaggtgctgtggctcatgggcgccaagtccaagtggctggcaggggatgtgcctgcagcaaggagcatcctggccctggccttccaggccaaccccaacagtgagganatctggctggcagccgtgaagctggagtccganaatgatgantacnaacgggcccngaagctgctggccaaggcgcgnaacaatgcccccnccncccgggtgttcatgaantctgtgaanctggantgggtgcaaanaacatcagggcanccnanatntgtgcnagaagccctgcggcactatgaagacttcccnanctgtgnatgatgaagggccaatcnngaccnaangaaatgatgaaaagcccggnaancntaaaacnngggntgaaaaatgncccctccccccctggggttttttccncgnn

SEQ ID NO: 169 - DNA, 1079 bp, Homo Sapiens
  misc_feature (3)..(3): n is a, c, g, or t
  misc_feature (15)..(15): n is a, c, g, or t
  misc_feature (791)..(791): n is a, c, g, or t
  misc_feature (840)..(840): n is a, c, g, or t
  misc_feature (898)..(898): n is a, c, g, or t
  misc_feature (907)..(907): n is a, c, g, or t
  misc_feature (910)..(910): n is a, c, g, or t
  misc_feature (926)..(926): n is a, c, g, or t
  misc_feature (932)..(932): n is a, c, g, or t
  misc_feature (961)..(961): n is a, c, g, or t
  misc_feature (969)..(969): n is a, c, g, or t
  misc_feature (981)..(981): n is a, c, g, or t
  misc_feature (983)..(983): n is a, c, g, or t
  misc_feature (992)..(992): n is a, c, g, or t
  misc_feature (994)..(994): n is a, c, g, or t
  misc_feature (1002)..(1002): n is a, c, g, or t
  misc_feature (1008)..(1008): n is a, c, g, or t
  misc_feature (1013)..(1013): n is a, c, g, or t
  misc_feature (1023)..(1023): n is a, c, g, or t
  misc_feature (1045)..(1045): n is a, c, g, or t
  misc_feature (1047)..(1047): n is a, c, g, or t
  misc_feature (1052)..(1052): n is a, c, g, or t
  misc_feature (1054)..(1055): n is a, c, g, or t
  misc_feature (1061)..(1061): n is a, c, g, or t
  misc_feature (1064)..(1064): n is a, c, g, or t
  misc_feature (1070)..(1070): n is a, c, g, or t
  misc_feature (1076)..(1076): n is a, c, g, or t
  misc_feature (1078)..(1078): n is a, c, g, or t
aanagagaaattacnatgagaggatcgcatcaccattcaccatcacggatcctatttaggtgacactatagaatcgtcgacccacgcgtccgggcgctccgaggttcgaggctgtgccccgcgaccccgccttcggcgctcggctcgcaggatggatcccgtacccgggacagactcggcgccgctggctggcctggcctggtcgtcggcctctgcacccccgccgcgggggttcagcgcgatctcctgcaccgtcgagggggcacccgccagctttggcaagagcttcgcgcagaaatctggctacttcctgtgccttagttctctgggcagcctagagaacccgcaggagaacgtggtggccgatatccagatcgtggtggacaagagccccctgccgctgggcttctcccccgtctgcgaccccatggattccaaggcctctgtgtccaagaagaaacgcatgtgtgtgaagctgttgcccctgggagccacggacacggctgtgtttgatgtccggctgagtgggaagaccaagacagtgcctggataccttcgaataggggacatgggcggctttgccatctggtgcaagaaggccaaggccccgaggccagtgcccaagccccgaggtctcagccgggacatgcagggcctctctctggatgcagccagccagccaagtaagggcggcctcctggagcggacagcgtcaaggctgggctctcgggcatccactctgcggaggaatgactccatctacgaggcctccagcctctatggcatctcanccatggatggggttcccttcacactccacccacgatttgagggcaaganctgcagccccctggccttctctgcttttggggacctgaccatcaagtctctggcgaanattgaggangantataactacggcttcntggtgnaaaaaacgcggctgcccgcctgcccccancgtctcanaatccctcaccntnccgcgaaananccccttantccacntcccnccagctgggncacccccctcatgatctggggncnccccntnntgatcnggnaacttnccctgnang

SEQ ID NO: 170 - DNA, 972 bp, Homo Sapiens
  misc_feature (883)..(883): n is a, c, g, or t
  misc_feature (921)..(921): n is a, c, g, or t
  misc_feature (935)..(935): n is a, c, g, or t
  misc_feature (942)..(944): n is a, c, g, or t
  misc_feature (946)..(965): n is a, c, g, or t
tagagaaattactatgagaggatcgcatcaccatcaccatcacggatcctatttaggtgacactatagaatcgtcgacccacgcgtccgaagagatgttaagcaagaaacaggagttcctggagaagaaaatcgagcaggagctgacggccgccaagaagcacggcaccaaaaacaagcgcgcggccctccaggcactgaagcgtaagaagaggtatgagaagcagctggcgcagatcgacggcacattatcaaccatcgagttccagcgggaggccctggagaatgccaacaccaacaccgaggtgctcaagaacatgggctatgccgccaaggccatgaaggcggcctatgacaacatggacatcgataaagttgatgagttaatgcaggacattgctgaccagcaagaacttgcagaggagatttcaacagcaatttcgaaacctgtagggtttggagaagagtttgacgaggatgagctcatggcggaattagaagaactagaacaggaggaactagacaagaatttgctggaaatcagtggacccgaaacagtccctctaccaaatgttccctctatagccctaccatcaaaacccgccaagaagaaagaagaggaggacgacgacatgaaggaattggagaactgggctggatccatgtaatggggtccagcgctggctgggcccagacagactgtggtggcctgcgcagcgagcaggcgtgtgcgtgtgtggggcaggcaggatgtggtgcaggcaggttccatcgctttcgactctcactccaaagcagtagggccgcgttgctgctcactctctgcatagcatggtctgcacctgggaaatgggcggggggaggggggcgggcggggtgggaantgcctgctgtttataatgttgaatttctgtaaataaanctgtattttgcaantccaaannnannnnnnnnnnnnnnnnnnnnaaagggc

SEQ ID NO: 171 - DNA, 1179 bp, Homo Sapiens
  misc_feature (902)..(902): n is a, c, g, or t
  misc_feature (921)..(921): n is a, c, g, or t
  misc_feature (935)..(935): n is a, c, g, or t
  misc_feature (953)..(953): n is a, c, g, or t
  misc_feature (976)..(976): n is a, c, g, or t
  misc_feature (999)..(999): n is a, c, g, or t
  misc_feature (1004)..(1004): n is a, c, g, or t
  misc_feature (1032)..(1032): n is a, c, g, or t
  misc_feature (1052)..(1052): n is a, c, g, or t
  misc_feature (1076)..(1076): n is a, c, g, or t
  misc_feature (1082)..(1083): n is a, c, g, or t
  misc_feature (1085)..(1085): n is a, c, g, or t
  misc_feature (1101)..(1101): n is a, c, g, or t
  misc_feature (1111)..(1111): n is a, c, g, or t
  misc_feature (1117)..(1117): n is a, c, g, or t
  misc_feature (1125)..(1126): n is a, c, g, or t
  misc_feature (1131)..(1131): n is a, c, g, or t
  misc_feature (1135)..(1135): n is a, c, g, or t
  misc_feature (1138)..(1138): n is a, c, g, or t
  misc_feature (1144)..(1145): n is a, c, g, or t
  misc_feature (1154)..(1154): n is a, c, g, or t
  misc_feature (1156)..(1156): n is a, c, g, or t
  misc_feature (1167)..(1167): n is a, c, g, or t
  misc_feature (1177)..(1177): n is a, c, g, or t
aatagagaaattactatgagaggatcgcatcaccatcaccatcacggatcctatttaggtgacactatagaatcgtcgacccacgcgtccggatggccgtgcagagggaccttgcgccggggtgcctgggcacagtgccctggcaggggggctcctctcctgtctcctcaggtccagatcaaggaagagacccgcttggtgtctgtcattgaccagattgacaaggctgtggccatcatcccccgaggcgccctcttcaagaccccttttggacccacccatgtcaatcggacctttgaaggactgtccttgtctgaggccaagaagctcagctcctacttccatttcagggagcctgttgagctaaagaataagaccttgcttgagaaggctgacctggacccctccctggatttcatggactccttggagcatgacattcccaaagggtcctggagcatccagatggagaggggcaatgccctggtggtgctgcgcagcctgctctggccgggcctcaccttctaccatgctccccgcaccaagaactatggctacgtctacgtgggcactggcgagaagaacatggacttgcccttcatgctatagaatgggagccagcctggatgtttttaaacagagtctaaacatgattttcttaagcttcagtgaacttggcctgcctgttctgtcctatcttcttaactccacctccgtctggttccagattctgaaaggcccactgagccagggagctcatttctaaaccaagtggcagaggggttggaatgtgctaatgaaagagattctagacaacgatgggtggaaatggctgtgggagaaggtgacaaccagggcccctttgaggaacgcagtttcttggattcacacgaaagcggcangtgtgtcaggcagcccacnttggctccctgcanctctcccacagtaagganctcacagctgtcatgaaaaagangggacctgtttggcccatgaatncaatngactcatggccccatcacaaaaaatcantgactcatgctcaccaccanctggcatgtgccagaaccctgcanttccannangaacgcaacccatggnaacccagaanccattnaaaaatgnntgggnaaantcngtcccnnatgaaaggncnaacccaaaaantggaaggacnaa

SEQ ID NO: 172 - DNA, 669 bp, Homo Sapiens
  misc_feature (3)..(3): n is a, c, g, or t
  misc_feature (5)..(5): n is a, c, g, or t
agnantagagaaaatactatgagaggatcgcatcaccatcaccatcacggatcctatttaggtgacactatagaatcgtcgacccacgcgtccgctttctcccaccgctttccgagcccgcttgcacctcggcgatccccgactcccttctttatggcgtcgctcctgtgctgtgggccgaagctggccgcctgcggcatcgtcctcagcgcctggggagtgatcatgttgataatgctcggaatatttttcaatgtccattccgctgtgttgattgaggacgttcccttcacggagaaagattttgagaatggcccccagaacatatacaacctttacgagcaagtcagctacaactgtttcatcgctgcaggcctttacctcctcctcggaggcttctctttctgccaagttcggctcaataagcgcaaggaatacatggtgcgctagggccccggcgcgtttccccgctccagcccctcctctatttaaagactccctgcaccgtgtcacccaggtcgcgtcccacccttgccggcgccctctgcgggactgggtttcccgggcgagagactgaatcccttctcccatctctggcatccggcccccgtggagagggctgaggctggggggctgtcccgtatctcaataaagagaatctgctctctt

SEQ ID NO: 173 - DNA, 1036 bp, Homo Sapiens
  misc_feature (1)..(1): n is a, c, g, or t
  misc_feature (3)..(3): n is a, c, g, or t
  misc_feature (15)..(15): n is a, c, g, or t
  misc_feature (25)..(25): n is a, c, g, or t
  misc_feature (798)..(798): n is a, c, g, or t
  misc_feature (800)..(800): n is a, c, g, or t
  misc_feature (843)..(843): n is a, c, g, or t
  misc_feature (847)..(847): n is a, c, g, or t
  misc_feature (889)..(889): n is a, c, g, or t
  misc_feature (906)..(906): n is a, c, g, or t
  misc_feature (928)..(928): n is a, c, g, or t
  misc_feature (938)..(938): n is a, c, g, or t
  misc_feature (956)..(956): n is a, c, g, or t
  misc_feature (983)..(983): n is a, c, g, or t
  misc_feature (989)..(989): n is a, c, g, or t
  misc_feature (993)..(994): n is a, c, g, or t
  misc_feature (997)..(997): n is a, c, g, or t
  misc_feature (1002)..(1002): n is a, c, g, or t
  misc_feature (1004)..(1004): n is a, c, g, or t
  misc_feature (1014)..(1014): n is a, c, g, or t
  misc_feature (1020)..(1020): n is a, c, g, or t
  misc_feature (1026)..(1026): n is a, c, g, or t
  misc_feature (1031)..(1032): n is a, c, g, or t
  misc_feature (1035)..(1035): n is a, c, g, or t
nanttagatagattnctatggatangatcgcatcaccatcaccatcacggatcctatttaggtgacactatagaatcgtcgacccacgcgtccggacgtgggcgtgcaggacgcgggcgtgcaggacgccagagctgggtcagagctcgagccagcggcgcccggagagattcggagatgcaggcggctcggatggccgcgagcttggggcggcagctgctgaggctcgggggcggaaggtctgtgtgtgacaagagggacggtgggcagcggccctgggcaccgggccggcactgaacccccactccccacagctcgcggctcacggcgctcctggggcagccccggcccggccctgcccggcggccctatgccgggggtgccgctcagctggctctggacaagtcagattcccacccctctgacgctctgaccaggaaaaaaccggccaaggcggaatctaagtcctttgctgtgggaatgttcaaaggccagctcaccacagatcaggtgttcccatacccgtccgtgctcaacgaagagcagacacagtttcttaaagagctggtggagcctgtgtcccgtttcttcgaggaagtgaacgatcccgccaagaatgacgctctggagatggtggaggagaccacttggcagggcctcaaggagctgggggcctttggtctgcaagtgcccagtgagctgggtggtgtgggcctttgcaacacccagtacgcccgtttggtggagatcgtgggcatgcatgaccttggcgtgggcattaccctgggggcccatcanancatcggtttcaaaggcatcctgctctttggcacaaaggcccanaaanaaaaatacctccccaagctggcatctggggaaactgtggccnctttctgtctaaccganccctcaagcgggtcaaatgcancctccatccnaacctctgctgtgcccancccttgtggaaaatactataccctcantggaancaannttngaatnantaatgggggncctaanaaaaantttcnnggnt

SEQ ID NO: 174 - DNA, 979 bp, Homo Sapiens
  misc_feature (1)..(1): n is a, c, g, or t
  misc_feature (724)..(724): n is a, c, g, or t
  misc_feature (781)..(781): n is a, c, g, or t
  misc_feature (819)..(819): n is a, c, g, or t
  misc_feature (846)..(846): n is a, c, g, or t
  misc_feature (859)..(859): n is a, c, g, or t
  misc_feature (862)..(862): n is a, c, g, or t
  misc_feature (880)..(880): n is a, c, g, or t
  misc_feature (882)..(882): n is a, c, g, or t
  misc_feature (888)..(888): n is a, c, g, or t
  misc_feature (891)..(891): n is a, c, g, or t
  misc_feature (894)..(895): n is a, c, g, or t
  misc_feature (914)..(914): n is a, c, g, or t
  misc_feature (916)..(916): n is a, c, g, or t
  misc_feature (919)..(919): n is a, c, g, or t
  misc_feature (926)..(926): n is a, c, g, or t
  misc_feature (935)..(935): n is a, c, g, or t
  misc_feature (947)..(947): n is a, c, g, or t
  misc_feature (953)..(953): n is a, c, g, or t
  misc_feature (957)..(957): n is a, c, g, or t
  misc_feature (963)..(963): n is a, c, g, or t
  misc_feature (965)..(965): n is a, c, g, or t
  misc_feature (969)..(969): n is a, c, g, or t
  misc_feature (973)..(973): n is a, c, g, or t
  misc_feature (978)..(979): n is a, c, g, or t
naatagagaaattactatgaagaggatcgcatcaccatcaccatcacggatcctatttaggtgacactatagaatcgtcgacccacgcgtccgcccacgcgtccgacggacaggcatgtgccacctatgaaagtgcctccctgcgcatgtttcacctgggccgcaccgacaccatccgctcggcttccatggactcactcacctttgtcaaggccatggatgactccagcgtcacggagcaccagaaggtggagctgctgcggaaggccgtgcaggcccaccgaggctacaccgaccgggccatccgcggggaggcctttgatcgacacctgctgggcctgaagctgcaggccatcgaggacctggtgagcatgcccgacatcttcatggacacctcctacgccatcgccatgcacttccacctctccaccagccaggtccctgccaagacagactgtgtcatgttcttcgggcccgtggtccccgacggctacggtgtctgctataaccccatggaggcccacatcaacttctccctgtcggcctacaacagctgcgcggagaccaacgccgcccgcctggcgcattacctggagaaggcgctcctggacatgcgtgccctgctgcagagccacccccgggccaagctctgagcccctaggactcaggcctgccaatgccacagccaagcccaccctaggatgggccacccaccagggctcanctccttggttccctcttccttggttccctcttccctggtccccccaaatctactganccacggaccgcatcctccagggggcctgcaggccccanccaagtgccttccgtgggtcatcccancacctgccagggnccnacctggggctgaatgcanangctgancangannttaggcccgggcccctggnangtnctccacnggtgcctcntctggggaaggnaaccancctncaaaanangaantggnaaaann

SEQ ID NO: 175 - DNA, 1158 bp, Homo Sapiens
  misc_feature (1)..(1): n is a, c, g, or t
  misc_feature (873)..(873): n is a, c, g, or t
  misc_feature (879)..(879): n is a, c, g, or t
  misc_feature (906)..(906): n is a, c, g, or t
  misc_feature (972)..(972): n is a, c, g, or t
  misc_feature (1021)..(1021): n is a, c, g, or t
  misc_feature (1025)..(1025): n is a, c, g, or t
  misc_feature (1046)..(1046): n is a, c, g, or t
  misc_feature (1053)..(1053): n is a, c, g, or t
  misc_feature (1062)..(1062): n is a, c, g, or t
  misc_feature (1068)..(1068): n is a, c, g, or t
  misc_feature (1070)..(1070): n is a, c, g, or t
  misc_feature (1076)..(1076): n is a, c, g, or t
  misc_feature (1082)..(1082): n is a, c, g, or t
  misc_feature (1093)..(1093): n is a, c, g, or t
  misc_feature (1097)..(1097): n is a, c, g, or t
  misc_feature (1109)..(1109): n is a, c, g, or t
  misc_feature (1113)..(1113): n is a, c, g, or t
  misc_feature (1130)..(1130): n is a, c, g, or t
  misc_feature (1134)..(1134): n is a, c, g, or t
  misc_feature (1137)..(1139): n is a, c, g, or t
  misc_feature (1144)..(1145): n is a, c, g, or t
  misc_feature (1147)..(1147): n is a, c, g, or t
  misc_feature (1149)..(1149): n is a, c, g, or t
  misc_feature (1154)..(1156): n is a, c, g, or t
naaatagagagaattactatgagaggatcgcatcaccatcaccatcacggatcctatttaggtgacactatagaatcgtcgacccacgcgtccgcggacgcgtgggcgcagctgtaccactcgccagcgcgacggttcggaggccccgttcaccaccaggcgcagagattcaggttctcccccatgggcgtcgatcacatgagcgggctctctggcgtcaacgtgccaggaaacgcctcctccggctggtgcattttcatctacaacctggggcaggatgccgacgaggggatcctctggcagatgtttgggccgtttggtgccgtcaccaatgtgaaagtgatccgcgacttcaacaccaacaagtgcaaagggtttggctttgtgaccatgacaaactatgaagaagccgcgatggccatagccagcctgaacggctaccgcctgggggacaaaatcttacaggtttccttcaaaaccaacaagtcccacaaataactcgctcatgcttttttttgtacggaatagataattaagagtgaaggagttgaaacttttcttgttagtgtacaactcattttgcgccaattttcacaagtgtttgtctttgtctgaatgagaagtgagaaggtttttatactctgggatgcaaccgacatgttcaaatgtttgaaatcccacaatgttagaccaatcttaagtttcgtaagttatttcctttaagatatatattaaacagaaatctaagtagaactgcattgactaaccagtccctctggatggtggtgaacctgaagcatgctttaacctctaagactgtctaacacgcgtttcattcaatgtctccacagactgggtagcaaaaaatcaccnttttanttttagtttttaatctaaagatgttanacagatgctgagtgtgcgttttctcaaccgcttcaacattgtaagcgatgtatgcttttggttganaggaagttccttttccaggcaggtcccgttgcccctcctgctcactcantccnggctctgccaatggtcctggnaaatggngggggcccntccagngnggggcncccctnggggccggggnccangggccccatggntggngggccctccaaaaaagnaaanaannngtttnntnanccccnnncc

SEQ ID NO: 176 - DNA, 687 bp, Homo Sapiens
  misc_feature (1)..(1): n is a, c, g, or t
  misc_feature (3)..(3): n is a, c, g, or t
  misc_feature (6)..(6): n is a, c, g, or t
  misc_feature (8)..(8): n is a, c, g, or t
  misc_feature (137)..(137): n is a, c, g, or t
  misc_feature (336)..(336): n is a, c, g, or t
  misc_feature (365)..(365): n is a, c, g, or t
  misc_feature (395)..(395): n is a, c, g, or t
  misc_feature (402)..(402): n is a, c, g, or t
  misc_feature (418)..(418): n is a, c, g, or t
  misc_feature (439)..(439): n is a, c, g, or t
  misc_feature (444)..(444): n is a, c, g, or t
  misc_feature (448)..(448): n is a, c, g, or t
  misc_feature (460)..(460): n is a, c, g, or t
  misc_feature (465)..(465): n is a, c, g, or t
  misc_feature (502)..(502): n is a, c, g, or t
  misc_feature (509)..(509): n is a, c, g, or t
  misc_feature (511)..(511): n is a, c, g, or t
  misc_feature (513)..(513): n is a, c, g, or t
  misc_feature (544)..(544): n is a, c, g, or t
  misc_feature (557)..(557): n is a, c, g, or t
  misc_feature (571)..(571): n is a, c, g, or t
  misc_feature (585)..(585): n is a, c, g, or t
  misc_feature (592)..(592): n is a, c, g, or t
  misc_feature (614)..(614): n is a, c, g, or t
  misc_feature (620)..(621): n is a, c, g, or t
  misc_feature (624)..(624): n is a, c, g, or t
  misc_feature (629)..(629): n is a, c, g, or t
  misc_feature (639)..(639): n is a, c, g, or t
  misc_feature (641)..(641): n is a, c, g, or t
  misc_feature (644)..(644): n is a, c, g, or t
  misc_feature (649)..(649): n is a, c, g, or t
  misc_feature (652)..(652): n is a, c, g, or t
  misc_feature (656)..(656): n is a, c, g, or t
  misc_feature (663)..(666): n is a, c, g, or t
  misc_feature (668)..(668): n is a, c, g, or t
  misc_feature (672)..(672): n is a, c, g, or t
  misc_feature (687)..(687): n is a, c, g, or t
ntnggngnaattactatgagaggatcgcatcaccattcaccatcacgggatcctatttaggtgacacttatagaatcgtcgacccacgcgttccggtcctcaccgcaatggcggctgtgagggccctggtggcctcnaggctcgctgcggcatctgcattcacgtccctgtcccccggcggtcggacgccttcccagcgcgcagcccttcacctctccgtgccgcgccccgcggccagggtcgcgctggtgctgtctggatgcggagtctacaatgggaccgagatccacgaggcctcggcgatcctggtgcacctgagccgtggaggggctgaantccagatctttgctcctgacgtccctcanatgcacgtgattgaccacaccaaggggcanccgtccnaaggcgaaagcaggantgttttgaccgaatctgcgangatcncccntggcaaaatcanagacntggccaacctcagtgtcaaccaaccatgatgctgccntctttcnangnaggctttggagcggttaaaaacctgagcacntttgccgtgcgangggaaacattgcanggtgaataaagaantggaacntgtccagaaggaattccaaccnagccgnnaancccancggactctgngntgnattgncancctntccatcnnnngncaanggtgatcagatatcn

SEQ ID NO: 177 - DNA, 1066 bp, Homo Sapiens
  misc_feature (887)..(887): n is a, c, g, or t
  misc_feature (910)..(910): n is a, c, g, or t
  misc_feature (918)..(918): n is a, c, g, or t
  misc_feature (962)..(962): n is a, c, g, or t
  misc_feature (968)..(968): n is a, c, g, or t
  misc_feature (972)..(972): n is a, c, g, or t
  misc_feature (976)..(976): n is a, c, g, or t
  misc_feature (986)..(986): n is a, c, g, or t
  misc_feature (1008)..(1008): n is a, c, g, or t
  misc_feature (1018)..(1018): n is a, c, g, or t
  misc_feature (1027)..(1027): n is a, c, g, or t
  misc_feature (1030)..(1030): n is a, c, g, or t
  misc_feature (1039)..(1039): n is a, c, g, or t
  misc_feature (1041)..(1041): n is a, c, g, or t
  misc_feature (1043)..(1043): n is a, c, g, or t
  misc_feature (1047)..(1047): n is a, c, g, or t
  misc_feature (1050)..(1050): n is a, c, g, or t
  misc_feature (1053)..(1053): n is a, c, g, or t
  misc_feature (1063)..(1063): n is a, c, g, or t
  misc_feature (1065)..(1066): n is a, c, g, or t
aaattagagaaattactatgagaggatcgcatcaccatcaccatcacggatcctatttaggtgacactatagaatcgtcgacccacgcgtccgggacaaaccgccttaattcagctgagtgttactacccagagaggaacgagtggcgaatgatcacagcaatgaacaccatccgaagcggggcaggcgtctgcgtcctgcacaactgtatctatgctgctgggggctatgatggtcaggaccagctgaacagcgtggagcgctacgatgtggaaacagagacgtggactttcgtagcccccatgaagcaccggcgaagtgccctggggatcactgtccaccaggggagaatctacgtccttggaggctatgatggtcacacgttcctggacagtgtggagtgttacgacccagatacagacacctggagcgaggtgacccgaatgacatcgggccggagtggggtgggcgtggctgtcaccatggagccctgccggaagcagattgaccagcagaactgtacctgttgaggcacttttgtttcttgggcaaaaatacagtccaatggggagtatcattgtttttgtacaaaaaccgggactaaaagaaaagacagcactgcaaataacccatcttccgggaagggaggccaggatgcctcagtgttaaaatgacatctcaaaagaagtccaaagcgggaatcatgtgcccctcagcggagccccgggagtgtccaagacagcctggctgggaaagggggtgtggaaagagcaggcttccaggagagaggcccccaaaccctctggccggggtaataggcctgggtcccactcacccatgccggcagctgtcaccatgtgatttattcttggatacctgggaggggnccaatgggggccctcagggggangccccctntggaaatgtggtttcccaagggatgggcctgtacataaaaaccnccgganggcncttnccccccgganggaacagttattttgttaaaantaaccctgtnattttcccnggnaaattaagnancnactnccnaanaaaaaaaaanann

SEQ ID NO: 178 - DNA, 1085 bp, Homo Sapiens
  misc_feature (929)..(929): n is a, c, g, or t
  misc_feature (961)..(961): n is a, c, g, or t
  misc_feature (963)..(964): n is a, c, g, or t
  misc_feature (985)..(985): n is a, c, g, or t
  misc_feature (1003)..(1003): n is a, c, g, or t
  misc_feature (1013)..(1013): n is a, c, g, or t
  misc_feature (1018)..(1018): n is a, c, g, or t
  misc_feature (1022)..(1022): n is a, c, g, or t
  misc_feature (1026)..(1026): n is a, c, g, or t
  misc_feature (1028)..(1028): n is a, c, g, or t
  misc_feature (1041)..(1041): n is a, c, g, or t
  misc_feature (1044)..(1044): n is a, c, g, or t
  misc_feature (1046)..(1046): n is a, c, g, or t
  misc_feature (1050)..(1050): n is a, c, g, or t
  misc_feature (1054)..(1054): n is a, c, g, or t
  misc_feature (1056)..(1056): n is a, c, g, or t
  misc_feature (1060)..(1060): n is a, c, g, or t
  misc_feature (1062)..(1062): n is a, c, g, or t
  misc_feature (1068)..(1069): n is a, c, g, or t
  misc_feature (1072)..(1072): n is a, c, g, or t
  misc_feature (1074)..(1074): n is a, c, g, or t
  misc_feature (1085)..(1085): n is a, c, g, or t
attagagaaattactatgagaggatcgcatcaccatcaccatcacggatcctatttaggtgacactatagaatcgtcgacccacgcgtccgagcactacatggcggaccgtctcctgggcgtggtctcgagctggctggagggggccgtgctggagcagatcggtccctgcttccccaaccgcctcccccagcagatgttgcagagcctgagcacctctaaggagctgcagcgccagttccacgtctaccagctccagcagctggatcaggaactcctgaagctggaggatacagagaagaaaatacaggtgggccttggggccagtggcaaggagcacaagagcgagaaggaagaggaagctggggcagcagcagtggtggatgtggcggagggagaggaggaagaggaggagaatgaggacctctactatgaaggggcaatgccagaagtgtctgtgcttgtcctgtcccgacactcctggcctgttgcctcaatctgccacacactgaaccccagaacctgcctgccctcctacctgaggggcactttgaacagatactccaacttctacaacaagagtcagagccaccctgcccttgagcgaggctcacagaggcgactgcagtggacgtggctgggctgggctgagctgcagtttgggaaccagaccctgcatgtgtccaccgtgcagatgtggctactgctgtatctcaacgacctgaaggcggtctctgtggagagtctgctggcgttctcagggctctccgcagacatgctcaatcaggcgattgggcccctcacctcttcaagaggccccctggaccttcacgagcaaaaggatataccaggaggggtcctcaagattcgagatggcagcaaggaacccaggtcgagatgggacattgtgcggctcatcccacctcaaangtacctgcaagctgaagggtgaaaacggccanannttggaaaaaaaacgaatcttntgaactgcctcatcgtcngaatcctcanggccntggnaaanangggctgcccattnacnancttntttntntggngntggagnnttngnaaaaaggcccn

SEQ ID NO: 179 - DNA, 1130 bp, Homo Sapiens
  misc_feature (2)..(2): n is a, c, g, or t
  misc_feature (814)..(814): n is a, c, g, or t
  misc_feature (832)..(832): n is a, c, g, or t
  misc_feature (835)..(835): n is a, c, g, or t
  misc_feature (839)..(839): n is a, c, g, or t
  misc_feature (841)..(841): n is a, c, g, or t
  misc_feature (854)..(854): n is a, c, g, or t
  misc_feature (860)..(860): n is a, c, g, or t
  misc_feature (864)..(864): n is a, c, g, or t
  misc_feature (891)..(891): n is a, c, g, or t
  misc_feature (900)..(900): n is a, c, g, or t
  misc_feature (922)..(922): n is a, c, g, or t
  misc_feature (926)..(926): n is a, c, g, or t
  misc_feature (940)..(940): n is a, c, g, or t
  misc_feature (948)..(948): n is a, c, g, or t
  misc_feature (952)..(952): n is a, c, g, or t
  misc_feature (972)..(972): n is a, c, g, or t
  misc_feature (979)..(979): n is a, c, g, or t
  misc_feature (1006)..(1006): n is a, c, g, or t
  misc_feature (1016)..(1016): n is a, c, g, or t
  misc_feature (1022)..(1022): n is a, c, g, or t
  misc_feature (1045)..(1046): n is a, c, g, or t
  misc_feature (1048)..(1048): n is a, c, g, or t
  misc_feature (1054)..(1054): n is a, c, g, or t
  misc_feature (1056)..(1056): n is a, c, g, or t
  misc_feature (1058)..(1058): n is a, c, g, or t
  misc_feature (1068)..(1068): n is a, c, g, or t
  misc_feature (1075)..(1075): n is a, c, g, or t
  misc_feature (1089)..(1090): n is a, c, g, or t
  misc_feature (1097)..(1097): n is a, c, g, or t
  misc_feature (1102)..(1102): n is a, c, g, or t
  misc_feature (1108)..(1110): n is a, c, g, or t
  misc_feature (1113)..(1113): n is a, c, g, or t
  misc_feature (1125)..(1125): n is a, c, g, or t
  misc_feature (1130)..(1130): n is a, c, g, or t
antagagaaattactatgagaggatcgcatcaccatcaccatcacggatcctatttaggtgacactatagaatcgtcgacccacgcgtccggcagcggggaggccgggagcccgcgggccggagccgcccggccgaggcgtgggggctgcggggccggcccatccgtgggggcgacttgagcgttgagggcgcgcggggaggcgagccaccatgttcagccagcagcagcagcagcagctccagcaacagcagcagcagctccagcagttacagcagcagcagctccagcagcagcaattgcagcagcagcagttactgcagctccagcagctgctccagcagtccccaccacaggccccgttgcccatggctgtcagccgggggctccccccgcagcagccacagcagccgcttctgaatctccagggcaccaactcagcctccctcctcaacggctccatgctgcagagagctttgcttttacagcagttgcaaggactggaccagtttgcaatgccaccagccacgtatgacactgccggtctcaccatgcccacagcaacactgggtaacctccgaggctatggcatggcatccccaggcctcgcagcccccagcctcacacccccacaactggccactccaaatttgcaacagttctttccccaggccactcgccagtccttgctgggacctcctcctgttggggtccccatgaacccttcccagttcaacctttcaggacggaacccccagaaacaggcccggacctcctcctctaccacccccaatcgaaaggattcttcttctcanacaatgcctgtggaaganaantcananccccccaaagggntctgangaanccgcaaaaccccggatggaaacaccanaagaccaanatttaccgccctgccaaaaganatcnccaaggaaaaaacncactccancacntgaaccctgaaccttgtgangggtccnaacttgccaacaaaaaaaattgaggancttcaaaaanaacccncaaaaaaaaggaacctccagggnnanttaaangntnaaagccccancccccanggccccggaattanntttcccnaaaanaaaacnnnaancccaaaacttgnttgcn

SEQ ID NO: 180 - DNA, 997 bp, Homo Sapiens
  misc_feature (861)..(861): n is a, c, g, or t
  misc_feature (875)..(875): n is a, c, g, or t
  misc_feature (878)..(878): n is a, c, g, or t
  misc_feature (886)..(886): n is a, c, g, or t
  misc_feature (890)..(890): n is a, c, g, or t
  misc_feature (929)..(929): n is a, c, g, or t
  misc_feature (932)..(932): n is a, c, g, or t
  misc_feature (937)..(937): n is a, c, g, or t
  misc_feature (940)..(940): n is a, c, g, or t
  misc_feature (942)..(943): n is a, c, g, or t
  misc_feature (948)..(948): n is a, c, g, or t
  misc_feature (955)..(955): n is a, c, g, or t
  misc_feature (962)..(962): n is a, c, g, or t
  misc_feature (964)..(964): n is a, c, g, or t
  misc_feature (969)..(969): n is a, c, g, or t
  misc_feature (971)..(971): n is a, c, g, or t
  misc_feature (975)..(975): n is a, c, g, or t
  misc_feature (987)..(987): n is a, c, g, or t
tagagaaattactatgagaggatcgcatcaccatcaccatcacggatcctatttaggtgacactatagaatcgtcgacccacgcgtccggaccgagggactgggagtcgttagtgaggatgacgcggcatggcaagaactgcaccgcaggggccgtctacacctaccacgagaagaagaaggacacagcggcctcgggctatgggacccagaacattcgactgagccgggatgccgtgaaggacttcgactgctgttgtctctccctgcagccttgccacgatcctgttgtcaccccagatggctacctgtatgagcgtgaggccatcctggagtacattctgcaccagaagaaggagattgcccggcagatgaaggcctacgagaagcagcggggcacccggcgcgaggagcagaaggagcttcagcgggcggcctcgcaggaccatgtgcggggcttcctggagaaggagtcggctatcgtgagccggcccctcaaccctttcacagccaaggccctctcgggcaccagcccagatgatgtccaacctgggcccagtgtgggtcctccaagtaaggacaaggacaaagtgctgcccagcttctggatcccgtcgctgacgcccgaagccaaggccaccaagctggagaagccgtcccgcacggtgacctgccccatgtcagggaagcccctgcgcatgtcggacctgacgcccgtgcacttcacaccgctagacagctccgtggaccgcgtggggctcatcacccgcagcgagcgctacgtgtgtgccgtgacccgcgacagcctgagcaacgccaccccctgcgctgtgctgcggccctctggggctgtggtcacccntcgaatgcgtgganaanctgattcngaanggacatggtggaaccctgtgactggaaaaaaactcacanacngcganatncnncttgnttgcaancggggcngntaccngncttncccgggcttccngaatgaaaac

SEQ ID NO: 181 - DNA, 1284 bp, Homo Sapiens
  misc_feature (920)..(920): n is a, c, g, or t
  misc_feature (975)..(975): n is a, c, g, or t
  misc_feature (980)..(980): n is a, c, g, or t
  misc_feature (1010)..(1010): n is a, c, g, or t
  misc_feature (1019)..(1019): n is a, c, g, or t
  misc_feature (1050)..(1050): n is a, c, g, or t
  misc_feature (1065)..(1065): n is a, c, g, or t
  misc_feature (1074)..(1074): n is a, c, g, or t
  misc_feature (1096)..(1096): n is a, c, g, or t
  misc_feature (1109)..(1109): n is a, c, g, or t
  misc_feature (1119)..(1119): n is a, c, g, or t
  misc_feature (1129)..(1129): n is a, c, g, or t
  misc_feature (1131)..(1131): n is a, c, g, or t
  misc_feature (1141)..(1141): n is a, c, g, or t
  misc_feature (1143)..(1143): n is a, c, g, or t
  misc_feature (1152)..(1152): n is a, c, g, or t
  misc_feature (1156)..(1156): n is a, c, g, or t
  misc_feature (1159)..(1159): n is a, c, g, or t
  misc_feature (1164)..(1164): n is a, c, g, or t
  misc_feature (1177)..(1178): n is a, c, g, or t
  misc_feature (1183)..(1183): n is a, c, g, or t
  misc_feature (1199)..(1199): n is a, c, g, or t
  misc_feature (1206)..(1206): n is a, c, g, or t
  misc_feature (1209)..(1210): n is a, c, g, or t
  misc_feature (1214)..(1214): n is a, c, g, or t
  misc_feature (1221)..(1221): n is a, c, g, or t
  misc_feature (1224)..(1224): n is a, c, g, or t
  misc_feature (1230)..(1231): n is a, c, g, or t
  misc_feature (1239)..(1239): n is a, c, g, or t
  misc_feature (1249)..(1249): n is a, c, g, or t
  misc_feature (1251)..(1251): n is a, c, g, or t
  misc_feature (1257)..(1257): n is a, c, g, or t
  misc_feature (1266)..(1266): n is a, c, g, or t
  misc_feature (1271)..(1271): n is a, c, g, or t
  misc_feature (1274)..(1274): n is a, c, g, or t
  misc_feature (1279)..(1279): n is a, c, g, or t
  misc_feature (1283)..(1283): n is a, c, g, or t
agagaaattactatgagaggatcgcatcaccatcaccatcacggatcctatttaggtgacactatagaatcgtcgacccacgcgtccgggactgagctcctgagctgctcccgtgatgacttgctaaaagttattgatctccgaacaaatgctatcaagcagacattcagtgcacctgggttcaagtgcggctctgactggaccagagttgtcttcagccctgatggcagttacgtggcggcaggctctgctgagggctctctgtatatctggagtgtgctcacagggaaagtggaaaaggttctttcaaagcagcacagctcatccatcaatgcggtggcgtggtcgccctctggctcgcacgttgtcagtgtggacaaaggatgcaaagctgtgctgtgggcacagtactgacggggctctcagggctgggaggaccccagtgccctcctcagaagaagcacatgggctcctgcagccctgtcctggcaggtgatgtgctgggtatagcatggacctcccagagaagctcaagctatgtggcactgtagctttgccgtgaatgggatttctgaagatttgactgaggtctctcttggcctggaagaataacactgaaaaaacctgacgctgcggtcacttagcagaggctcaggttcttgccttgggaaacactactagctctgaccttccatacctcacttgggggagcacagggccccgctgggcctcctcaccaacggcagtgccaaaatcagcccccacatcaaggtggtgttctctgtgctttctctcgtccttccaaagtcggttctggcctaacgcatgtcccaacaccttgggttcatttgcccggtgaactcactttaagcattggattaacggaaactcccgaactacagacccctccctggtgggtngcatgaatgtgtctcattactgctgaaatgtcctcacatctcttccactgttctncaaanctttctggctctctttccccacaaaattcnacacatttnaaaaatccccgtgtggcttttaaaaaagggntttttggttttttgnttttttgangtgggaaaagaatgtgtgaaantctttttccaggnaaatgggttnccctgcaaangnaaagaatgtntncctgtatcnattngcnaaaancccaaaagggggnnccccntgcatgcttgggggtnccaaggnatnnaaanccccaanaantttttnnaagggggnaatttgggcntngccccnttccaaccnggggnaanccctngggnt

SEQ ID NO: 182 - DNA, 903 bp, Homo Sapiens
  misc_feature (3)..(3): n is a, c, g, or t
  misc_feature (819)..(819): n is a, c, g, or t
  misc_feature (843)..(843): n is a, c, g, or t
  misc_feature (892)..(892): n is a, c, g, or t
cantagagagaattactatgagaggatcgcatcaccatcaccatcacggatcctatttaggtgacactatagaatcgtcgacccacgcgtccgggaacttgcaccgaagcatcactcgagaccccaaacctccaggcctgaggcccagccagcgcccaatggatgacaaaaagaagaaacggagtcccaagccctgcctggcccagccagcccaggccccaggcacactacggagggtccctgtgcctaccagccacagcggctccttggccctaggacttcctcatctgccatcccccaagcagcgggccaagttcaagagagtaggcaaagagaagtgccgcccagtcctggctggaggtggaagcggctctgcaggcacgcccctgcagcactccttcctgaccgaggtgactgatgtctatgagatggaggggggactcctgaacctgctcaatgatttccactctggccggctgcaggccttcgggaaggaatgctcctttgagcagctggagcacgttcgggagatgcaggagaagctagcccggctgcacttcagcctggatgtgtgtggggaggaggaggacgatgaagaggaagaggatggggtcactgaggggctgccagaggagcagaagaagacaatggctgaccgtaacctggaccagctgcttagcaatctggaagacctcagtaattctatccagaagctgcacctggccgagaacgccgagcctgaggagcagtccgctgcgtaggcgtcccacgcaggcccacactgcccctctcattctcttcaaactgtgacttttttanagactcgggcgggtgttctgcggncccccaggtgctatgggggaaggggggcgttgaatggaattaaaaccanaaaagaaaagc

SEQ ID NO: 183 - DNA, 1055 bp, Homo Sapiens
  misc_feature (605)..(605): n is a, c, g, or t
  misc_feature (692)..(692): n is a, c, g, or t
  misc_feature (731)..(731): n is a, c, g, or t
  misc_feature (738)..(738): n is a, c, g, or t
  misc_feature (761)..(761): n is a, c, g, or t
  misc_feature (788)..(788): n is a, c, g, or t
  misc_feature (811)..(811): n is a, c, g, or t
  misc_feature (827)..(827): n is a, c, g, or t
  misc_feature (845)..(845): n is a, c, g, or t
  misc_feature (863)..(863): n is a, c, g, or t
  misc_feature (872)..(872): n is a, c, g, or t
  misc_feature (877)..(877): n is a, c, g, or t
  misc_feature (888)..(888): n is a, c, g, or t
  misc_feature (918)..(918): n is a, c, g, or t
  misc_feature (945)..(945): n is a, c, g, or t
  misc_feature (947)..(947): n is a, c, g, or t
  misc_feature (955)..(956): n is a, c, g, or t
  misc_feature (960)..(962): n is a, c, g, or t
  misc_feature (964)..(964): n is a, c, g, or t
  misc_feature (966)..(966): n is a, c, g, or t
  misc_feature (1001)..(1004): n is a, c, g, or t
  misc_feature (1006)..(1006): n is a, c, g, or t
  misc_feature (1013)..(1013): n is a, c, g, or t
  misc_feature (1020)..(1020): n is a, c, g, or t
  misc_feature (1032)..(1032): n is a, c, g, or t
  misc_feature (1035)..(1035): n is a, c, g, or t
  misc_feature (1038)..(1038): n is a, c, g, or t
  misc_feature (1041)..(1041): n is a, c, g, or t
tagagaaattactatgagaggatcgcatcaccatcaccatcacggatcctatttaggtgacactatagaatcgtcgacccacgcgtccggtaggaagaaggcactgaccgactacaagaagctgcgggccttctttgtggaggaggaggagcatttcctgcaggaggctgagaaggaggaggggctccctgaggacgagctggctgaccccactgagcggttcaggtcactgctgcaggcggtctcggagctggagaagaagcatcgcaacctgggcctcagcatgctgctgcagtgatggcgccaacccgtggcagtcccagagctggaggcaggaggatggatcctcatctccatgggaagtgtcagcgtgtggctgccagggaagcgtggcaggcgcctggccttgggtccatctacatagttgcgtgtttcaacaatgtccatttatccttcaccctgaggcgtgttttgggggctgcaaacacctcccggtagaggctggacctgaggacccttcccacctgtgcccgtcccttcctgaagtcctagccacagcccatcctccatgagtcccggcagctctgggtcatgcccttccctgntcacccatctgcccctcacctcgtcatccagggacccagaccctgcaccttccatgtgggcccacagatccttggcaggtacctgangtgcaccattgagtgtcggatttgggggttagcatccanaaagaanaatgcgcatgacgctctgtgaangctggaactcaggtcttcagggaaaanaaaggaaaaactggattgcaccnttgatgccctcctgangaaggcggcccccccttnttgaaggtgggcgtgggncccggcccnaaccntattcaagtcncttctgtccacccttccccctttcctgggncccccaacccaattcctgttgcctccnangaaacccnncctnnngntnccacctggcctccccaaaaaagaaacccccttttnnnntnttttccntgggggnaaggggcttggnaanggnggnttaacccccatttt

SEQ ID NO: 184 - DNA, 1024 bp, Homo Sapiens
  misc_feature (2)..(2): n is a, c, g, or t
  misc_feature (728)..(728): n is a, c, g, or t
  misc_feature (747)..(747): n is a, c, g, or t
  misc_feature (754)..(754): n is a, c, g, or t
  misc_feature (810)..(810): n is a, c, g, or t
  misc_feature (813)..(813): n is a, c, g, or t
  misc_feature (825)..(825): n is a, c, g, or t
  misc_feature (838)..(838): n is a, c, g, or t
  misc_feature (856)..(856): n is a, c, g, or t
  misc_feature (864)..(864): n is a, c, g, or t
  misc_feature (871)..(871): n is a, c, g, or t
  misc_feature (877)..(877): n is a, c, g, or t
  misc_feature (879)..(879): n is a, c, g, or t
  misc_feature (882)..(882): n is a, c, g, or t
  misc_feature (888)..(888): n is a, c, g, or t
  misc_feature (890)..(890): n is a, c, g, or t
  misc_feature (898)..(898): n is a, c, g, or t
  misc_feature (900)..(900): n is a, c, g, or t
  misc_feature (911)..(911): n is a, c, g, or t
  misc_feature (913)..(913): n is a, c, g, or t
  misc_feature (924)..(924): n is a, c, g, or t
  misc_feature (939)..(940): n is a, c, g, or t
  misc_feature (942)..(942): n is a, c, g, or t
  misc_feature (947)..(947): n is a, c, g, or t
  misc_feature (949)..(949): n is a, c, g, or t
  misc_feature (953)..(953): n is a, c, g, or t
  misc_feature (963)..(963): n is a, c, g, or t
  misc_feature (974)..(974): n is a, c, g, or t
  misc_feature (982)..(982): n is a, c, g, or t
  misc_feature (990)..(991): n is a, c, g, or t
  misc_feature (1000)..(1000): n is a, c, g, or t
  misc_feature (1005)..(1005): n is a, c, g, or t
  misc_feature (1011)..(1011): n is a, c, g, or t
  misc_feature (1013)..(1013): n is a, c, g, or t
  misc_feature (1024)..(1024): n is a, c, g, or t
antagagaaattactatgagaggatcgcatcaccatcaccatcacggatcctatttaggtgacactatagaatcgtcgacccacgcgtccggtgagcgtggggagctgccgccaccgcctgctcctcgtcgtcctcgtcctccggggccccggcgtcgtgggccgcgcatggccctggaagagaagtcggcgccccttcatccgcctctctctcaccgcgccgctcccgcctcctcattctgcgttgcgggctcaggcggaacccggaacggccgtcctcttaccccgccctccgccgccgcctcctcctcctcctccacctccacctccttctcttcctcctcctcggcttcctcctcagccccgggccggagcggggtgtcggcagcggccggttcgggcggcgactcgcgcttctctgggcggcggcgcttggccatgtcgtgtcggggaaggtaatgagccgcagagccccggggtctcggctgagcagcggcggcaccaactattcgcggagctggaatgactggcaacccagattgacttgatgcaaaacatcacaaaggctccatgttacacagtatgcgatttttgagaactgatagtgcatcagctgacccaggtaatttaaaatattcttcatccagagatagaggtggttcttcctcttacggactgcaaccttcaaattcagctgtggtgtctcggcaaaggcacgatgataccanagtccacgctgacatacanaatgacnaaaagggtggctacagtgtcaatggaggatctggggaaaatacttatggtcggaantcnttggggcaaganctgaagggttaanaatgtgaccagccctganttcaccantgttcancatggnantcntgcttnanccacaaananatgaggaaatnanaggaaaaatcnatgtcttattgtgannantctcnantgtnaatcttcttngaagatcaccnggaaaaanaaaaaaanngaaaattgntaatntaaaanantttaaaaaaan

SEQ ID NO: 185 - DNA, 1189 bp, Homo Sapiens
  misc_feature (820)..(820): n is a, c, g, or t
  misc_feature (826)..(827): n is a, c, g, or t
  misc_feature (853)..(853): n is a, c, g, or t
  misc_feature (857)..(857): n is a, c, g, or t
  misc_feature (870)..(870): n is a, c, g, or t
  misc_feature (878)..(878): n is a, c, g, or t
  misc_feature (925)..(925): n is a, c, g, or t
  misc_feature (939)..(939): n is a, c, g, or t
  misc_feature (943)..(943): n is a, c, g, or t
  misc_feature (960)..(960): n is a, c, g, or t
  misc_feature (974)..(974): n is a, c, g, or t
  misc_feature (987)..(987): n is a, c, g, or t
  misc_feature (992)..(992): n is a, c, g, or t
  misc_feature (1020)..(1020): n is a, c, g, or t
  misc_feature (1022)..(1022): n is a, c, g, or t
  misc_feature (1039)..(1040): n is a, c, g, or t
  misc_feature (1043)..(1043): n is a, c, g, or t
  misc_feature (1045)..(1045): n is a, c, g, or t
  misc_feature (1056)..(1056): n is a, c, g, or t
  misc_feature (1059)..(1060): n is a, c, g, or t
  misc_feature (1065)..(1065): n is a, c, g, or t
  misc_feature (1074)..(1074): n is a, c, g, or t
  misc_feature (1079)..(1080): n is a, c, g, or t
  misc_feature (1114)..(1114): n is a, c, g, or t
  misc_feature (1118)..(1118): n is a, c, g, or t
  misc_feature (1123)..(1123): n is a, c, g, or t
  misc_feature (1131)..(1131): n is a, c, g, or t
  misc_feature (1141)..(1141): n is a, c, g, or t
  misc_feature (1146)..(1146): n is a, c, g, or t
  misc_feature (1154)..(1154): n is a, c, g, or t
  misc_feature (1168)..(1168): n is a, c, g, or t
  misc_feature (1171)..(1171): n is a, c, g, or t
  misc_feature (1173)..(1174): n is a, c, g, or t
  misc_feature (1177)..(1177): n is a, c, g, or t
  misc_feature (1182)..(1182): n is a, c, g, or t
caatagagaaattactatgagaggatcgcatcaccatcaccatcacggatcctatttaggtgacactatagaatcgtcgacccacgcgtccgtcaccacgccctgcctgacacaaagcacggctgccccagcagtgagggcctccagctcacctgtcaccttgcgtcagaagactgtggactggaggagagtgtccagactgcaggaggaccccgagggaacagagaacccgcttggggtagacgagtcccttttcagctatggccttcgagagagcattgcctcttacctgtccctgaccagtgaggacaacacctcctttgatcgaaagaagaaaagcatctccctgatgtatggtggcagcaagagaaagagctcattcttctcatcaccaccttactttgaggactagccaagaacagacacaatggttcatgcccaaaaggaacagaagttccaactattgcctgggatcttgcgaaaagcgaggttccctgatccccgggagcctcacgtattttagaagccaagagaagccacatggagactcaaattcgcatcttctctatccacatcatgaccaaaggaacccctccctggtgtctgatcagggctgtggcatcacgaaacattggatcatgacatgtcgggcgatgcttggaagagcccagcatgtatgtatgcacacattgtgtgtgtgggaaggacaaagccactctcacaagaaagggcaccaggactgctctccaaggaactggacctgtccagacagttacactccaaggtcattggagagaacttctgtatgggcaagcctganaaggannaggaaacaaaagctgtgtcctggcanaagntctgggtttgcanatgggtgnccctgaatggaactacctttaactaattccaaagggacttctgggantgctttccctctcntttnaaaggaaactttcgtgnaccctaaacattancccaaaggacttntttanccttccattggggaaaaatccttttggntntgctcctggcccccaannccntntgggggggaantcnntttgnccctccctngtttnngcaaagggcccaaaaaaatgaaaaaaaaaaaaanttgntggcngggaaaanccaaggaggngaaanaaaaaatncccccctttccctnaantnngcnccccntggtttt

SEQ ID NO: 186 - DNA, 1148 bp, Homo Sapiens
  misc_feature (921)..(921): n is a, c, g, or t
  misc_feature (927)..(927): n is a, c, g, or t
  misc_feature (937)..(937): n is a, c, g, or t
  misc_feature (951)..(951): n is a, c, g, or t
  misc_feature (958)..(958): n is a, c, g, or t
  misc_feature (972)..(972): n is a, c, g, or t
  misc_feature (980)..(980): n is a, c, g, or t
  misc_feature (987)..(988): n is a, c, g, or t
  misc_feature (1006)..(1006): n is a, c, g, or t
  misc_feature (1014)..(1014): n is a, c, g, or t
  misc_feature (1021)..(1021): n is a, c, g, or t
  misc_feature (1025)..(1025): n is a, c, g, or t
  misc_feature (1041)..(1041): n is a, c, g, or t
  misc_feature (1050)..(1050): n is a, c, g, or t
  misc_feature (1060)..(1060): n is a, c, g, or t
  misc_feature (1068)..(1072): n is a, c, g, or t
  misc_feature (1082)..(1085): n is a, c, g, or t
  misc_feature (1090)..(1090): n is a, c, g, or t
  misc_feature (1099)..(1099): n is a, c, g, or t
  misc_feature (1109)..(1110): n is a, c, g, or t
  misc_feature (1132)..(1132): n is a, c, g, or t
  misc_feature (1141)..(1141): n is a, c, g, or t
  misc_feature (1147)..(1147): n is a, c, g, or t
attagagaaattactatgagaggatcgcatcaccatcaccatcacggatcctatttaggtgacactatagaatcgtcgacccacgcgtccggagagactgcggcgggagggccaggccgtgggagagacgcgggaaagtgcgggtcgcagaggcacttgaccaccccgccctaggccgacccggcggacgcggcgtctggtcccaggtctccccgctgcgctgcttgaggctcagccatggcccagcagagagccctgccccagagcaaggagacgctgctgcagtcctacaacaagcggctgaaggacgacattaagtccatcatggacaacttcaccgagatcatcaagaccgccaagattgaggacgagacgcaggtgtcacgggccactcagggtgaacaggacaattacgagatgcatgtgcgagccgccaacatcgtccgagccggcgagtccctgatgaagctggtgtccgacctcaagcagttcctgatcctcaatgacttcccctccgtgaacgaggccattgaccagcgcaaccagcagctgcgcacactgcaggaggagtgcgaccggaagctcatcacgctgcgagacgagatctccattgacctctacgagctggaggaggagtattactcgtccagctcaagcctttgcgaagctaatgacctgcctctgtgcgaagcttacgggaggctggacctcgacacagactctgctgatggcctctcggcccctctgctggcatccccggagcccagtgctggccccctacaggtggcagcccctgcccactcccatgctggtggccctggccccactgagcacgcctgagcctccggggccacgcttcgttctcaggaacaaaacctgaggcagcccctttggatgccctcacagccttgcttctctcancctagnttcccatttnggggacttcaggancccaaancccctaggactttnttgggaancccgttnnccccagggtgggtccccnccaggaanagtaggnaaanaattttttttccttanccattttcnaaaaacccantcatttcnnnnncatcatcttnnnntttgntgcccttcngggccagccnngggggaaaaaaaattttccaanctaggtttnggcccnt

SEQ ID NO: 187 - DNA, 715 bp, Homo Sapiens
  misc_feature (1)..(1): n is a, c, g, or t
  misc_feature (685)..(685): n is a, c, g, or t
  misc_feature (691)..(692): n is a, c, g, or t
  misc_feature (695)..(697): n is a, c, g, or t
  misc_feature (699)..(702): n is a, c, g, or t
  misc_feature (704)..(715): n is a, c, g, or t
naattagagaaattactatgagaggatcgcatcaccatcaccatcacggatcctatttaggtgacactatagaatcgtcgacccacgcgtccgtggcttctcatcgtctgctcctcctctgccttgctggactggtatttgtgtctgaggctggccctacgggcaccggtgaatccaagtgtcctctgatggtcaaagttctagatgctgtccgaggcagtcctgccatcaatgtggccgtgcatgtgttcagaaaggctgctgatgacacctgggagccatttgcctctgggaaaaccagtgagtctggagagctgcatgggctcacaactgaggaggaatttgtagaagggatatacaaagtggaaatagacaccaaatcttactggaaggcacttggcatctccccattccatgagcatgcagaggtggtattcacagccaacgactccggcccccgccgctacaccattgccgccctgctgagcccctactcctattccaccacggctgtcgtcaccaatcccaaggaatgagggacttctcctccagtggacctgaaggacgagggatgggatttcatgtaaccaagagtattccatttttactaaagcagtgttttcacctcatatgctatgttagaagtccaggcagagacaataaaacattcctgtgaaaggcaaanaaaaannaannnannnnannnnnnnnnnnn

SEQ ID NO: 188 - DNA, 1179 bp, Homo Sapiens
  misc_feature (876)..(876): n is a, c, g, or t
  misc_feature (965)..(965): n is a, c, g, or t
  misc_feature (990)..(990): n is a, c, g, or t
  misc_feature (1007)..(1007): n is a, c, g, or t
  misc_feature (1027)..(1027): n is a, c, g, or t
  misc_feature (1047)..(1047): n is a, c, g, or t
  misc_feature (1055)..(1055): n is a, c, g, or t
  misc_feature (1100)..(1100): n is a, c, g, or t
  misc_feature (1109)..(1109): n is a, c, g, or t
  misc_feature (1115)..(1115): n is a, c, g, or t
  misc_feature (1125)..(1125): n is a, c, g, or t
  misc_feature (1127)..(1127): n is a, c, g, or t
  misc_feature (1134)..(1134): n is a, c, g, or t
  misc_feature (1141)..(1142): n is a, c, g, or t
  misc_feature (1153)..(1154): n is a, c, g, or t
  misc_feature (1171)..(1171): n is a, c, g, or t
tagagaaattactatgagaggatcgcatcaccatcaccatcacggatcctatttaggtgacactatagaatcgtcgacccacgcgtccgcgcatgagcggctggacctaaagaagatccagttccccaagaaagaggccaagacccccactaagaacggacttcctgggtcccgtcctggctctccagagagagaggtgaaacggaaggtggaggtggtttcaccagcaactccagtgcccagcgagacagccccggcctcggtttttccccagaatggagccgcccgtagggcagtggcagcccagccaggacggaagcgaaaatcgaattgtttgggcactgatgaggactcccaggacagctctgatggaataccgtcagcaccacgcatgactggcagcctggtgtctgatcgaagccacgacgacatcgtcacccggatgaagaacattgagtgcattgagctgggccggcaccgcctcaagccgtggtacttctccccgtacccacaggaactcaccacattgcctgtcctctacctgtgcgagttctgcctcaagtacggccgtagtctcaagtgtcttcagcgtcatttgaccaagtgtgacctacgacatcctccaggcaatgagatttaccgcaagggcaccatctccttctttgagattgatggacgtaagaacaagagttattcccagaacctgtgtcttttggccaagtgtttccttgaccataagacactgtactatgacacagaccctttcctcttctacgtcatgacagagtatgactgtaagggcttccacatcgtgggctacttctccaaggagaaagaatcaacggaagactacaatgtggcctgcatcctaacccntgcctccctaccagcgccggggctacggcaagctgctgatcgagttcagctatgaactctccaaagtggaagggaaaacagggaccccntgaaaagcccctctcaaaacttggnctcctatcctatcgaanctactggtcccaaaccttcntggaaaatcctgatggggcntaaatccngaaaacggggaaaagccccaaattcccttcatgaaattattgaantcccccccnttcaanaaggaggatntntttcccnttttggnnaacctcaattnnttaaataataaagggcnataaattc

SEQ ID NO: 189 - DNA, 1179 bp, Homo Sapiens
  misc_feature (939)..(939): n is a, c, g, or t
  misc_feature (943)..(943): n is a, c, g, or t
  misc_feature (964)..(964): n is a, c, g, or t
  misc_feature (973)..(973): n is a, c, g, or t
  misc_feature (997)..(997): n is a, c, g, or t
  misc_feature (1006)..(1006): n is a, c, g, or t
  misc_feature (1008)..(1008): n is a, c, g, or t
  misc_feature (1012)..(1012): n is a, c, g, or t
  misc_feature (1016)..(1016): n is a, c, g, or t
  misc_feature (1042)..(1042): n is a, c, g, or t
  misc_feature (1094)..(1095): n is a, c, g, or t
  misc_feature (1108)..(1108): n is a, c, g, or t
  misc_feature (1122)..(1122): n is a, c, g, or t
  misc_feature (1129)..(1129): n is a, c, g, or t
  misc_feature (1133)..(1133): n is a, c, g, or t
  misc_feature (1135)..(1136): n is a, c, g, or t
  misc_feature (1145)..(1146): n is a, c, g, or t
  misc_feature (1153)..(1153): n is a, c, g, or t
  misc_feature (1155)..(1155): n is a, c, g, or t
  misc_feature (1159)..(1159): n is a, c, g, or t
  misc_feature (1167)..(1168): n is a, c, g, or t
  misc_feature (1175)..(1175): n is a, c, g, or t
  misc_feature (1179)..(1179): n is a, c, g, or t
aatagagaaattactatgagaggatcgcatcaccatcaccatcacggatcctatttaggtgacactatagaatcgtcgacccacgcgtccgccgtgaagaaggcagataaagtggagcagaggaagctgctggaaaagtgtgccatgaccgctctgagctccaagctgatctcccagcagaaagctttctttgctaagatggtggtggatgcagtgatgatgctcgatgatttgctgcagcttaaaatgattggaatcaagaaggtacagggtggagccctcgaggattctcagctggtagctggtgttgcattcaagaagactttctcttacgctgggtttgaaatgcaacccaaaaagtaccacaatcccaagattgcccttttgaatgtcgagctcgagttgaaagctgagaaagacaatgctgagataagagtccacacagttgaggattatcaggcaattgttgatgctgagtggaacattctctatgacaagttagagaagatccatcattctggagccaaagttgtcttgtccaaactccccattggggatgtggccacccagtactttgctgacagggacatgttctgtgctggccgagtacctgaggaggatctgaagaggacaatgatggcctgtggaggctcaatccagaccagtgtgaatgctctgtcagcagatgtgctgggtcgatgccaggtgtttgaagagacccagattggaggcgagaggtacaatttttttactggctgccccaaggccaagacatgcaccttcattctccgtggcggcgccgagcagtttatggaggagacagagcggtctctgcatgatgccatcatgatcgtcaggagggccatcaagaatgattcagtggtggctggtggcggggccattgagatggaactctccaagtacctgcgggattactcnaggnactattccaggaaaacagcanctgttgatnggggcatatgccaaggccttgganattatcccncnccanctgngtgacaatgctggctttgatgccccnaacattctcaaaagctgcgggctcggcatgcccaggggggtacatggtatgnntaaacttcacacnaggacttgctgacnctttgancttncnnggggacccnnttggggngnatantgcctganncaccccngagn

SEQ ID NO: 190 - DNA, 965 bp, Homo Sapiens
  misc_feature (652)..(652): n is a, c, g, or t
  misc_feature (749)..(749): n is a, c, g, or t
  misc_feature (771)..(771): n is a, c, g, or t
  misc_feature (776)..(776): n is a, c, g, or t
  misc_feature (810)..(810): n is a, c, g, or t
  misc_feature (825)..(825): n is a, c, g, or t
  misc_feature (830)..(830): n is a, c, g, or t
  misc_feature (848)..(848): n is a, c, g, or t
  misc_feature (855)..(855): n is a, c, g, or t
  misc_feature (869)..(869): n is a, c, g, or t
  misc_feature (878)..(878): n is a, c, g, or t
  misc_feature (880)..(880): n is a, c, g, or t
  misc_feature (883)..(883): n is a, c, g, or t
  misc_feature (903)..(903): n is a, c, g, or t
  misc_feature (912)..(912): n is a, c, g, or t
  misc_feature (914)..(915): n is a, c, g, or t
  misc_feature (919)..(919): n is a, c, g, or t
  misc_feature (923)..(923): n is a, c, g, or t
  misc_feature (925)..(925): n is a, c, g, or t
  misc_feature (933)..(934): n is a, c, g, or t
  misc_feature (939)..(939): n is a, c, g, or t
  misc_feature (951)..(951): n is a, c, g, or t
  misc_feature (957)..(957): n is a, c, g, or t
  misc_feature (959)..(959): n is a, c, g, or t
  misc_feature (961)..(961): n is a, c, g, or t
aatagagaaattactatgagaggatcgcatcaccatcaccatcacggatcctatttaggtgacactatagaatcgtcgacccacgcgtccggggcggaggtgggtcggggggcccccaaatgggcttgcccccccctcccccagccctgcggccccgcctcgtgttccacacccagctggcccatggcagtcccactggccgcatcgagggcttcaccaacgtcaaggagctgtatggcaagatcgccgaggccttccgcctgccaactgccgaggtgatgttctgcaccctgaacacccacaaagtggacatggacaagctcctggggggccagatcgggctggaggacttcatcttcgcccacgtgaaggggcagcgcaaggaggtggaggtgttcaagtcggaggatgcactcgggctcaccatcacggacaacggggctggctacgccttcatcaagcgcatcaaggagggcagcgtgatcgaccacatccacctcatcagcgtgggcgacatgatcgaggccattaacgggcagagcctgctgggctgccggcactacgaggtggcccggctgctcaaggagctgccccgaggccgtaccttcacgctgaagctcacggagcctcgcaaggccttcgacatgatcanccagcgttcagcgggtggccgccctggctctggcccacaactgggcactggccgaaggaccctgcggctccgatcccggggccccgccacggtggangatctgccctctgcctttgaanaaaangccattgaaaaagtggatgaacctgctggaaaanttacatgggtatcanggaanacggaacttggcggccancattggnggaactgggaaaangaaaaaaangnaancccggataaactggcccaangccccttgnannaaangggntngggtgaanntttgncttttccctganaaaaantncntctt

SEQ ID NO: 191 - DNA, 1081 bp, Homo Sapiens
  misc_feature (859)..(859): n is a, c, g, or t
  misc_feature (884)..(884): n is a, c, g, or t
  misc_feature (887)..(887): n is a, c, g, or t
  misc_feature (889)..(889): n is a, c, g, or t
  misc_feature (904)..(904): n is a, c, g, or t
  misc_feature (928)..(928): n is a, c, g, or t
  misc_feature (933)..(933): n is a, c, g, or t
  misc_feature (937)..(937): n is a, c, g, or t
  misc_feature (939)..(939): n is a, c, g, or t
  misc_feature (958)..(958): n is a, c, g, or t
  misc_feature (970)..(970): n is a, c, g, or t
  misc_feature (987)..(987): n is a, c, g, or t
  misc_feature (1000)..(1000): n is a, c, g, or t
  misc_feature (1009)..(1009): n is a, c, g, or t
  misc_feature (1016)..(1016): n is a, c, g, or t
  misc_feature (1019)..(1021): n is a, c, g, or t
  misc_feature (1023)..(1023): n is a, c, g, or t
  misc_feature (1025)..(1025): n is a, c, g, or t
  misc_feature (1035)..(1035): n is a, c, g, or t
  misc_feature (1037)..(1037): n is a, c, g, or t
  misc_feature (1048)..(1049): n is a, c, g, or t
  misc_feature (1056)..(1057): n is a, c, g, or t
  misc_feature (1061)..(1061): n is a, c, g, or t
  misc_feature (1063)..(1063): n is a, c, g, or t
  misc_feature (1071)..(1072): n is a, c, g, or t
  misc_feature (1080)..(1080): n is a, c, g, or t
aaattagagaaattactatgagaggatcgcatcaccatcaccatcacggatcctatttaggtgacactatagaatcgtcgacccacgcgtccgcccacgcgtccgcgcagtggaagaaacattggtttgtgctgacagattcaagtctcaaatattacagagactccactgctgaggaggcagatgagctggatggtgagatcgacctgcgttcctgcacggatgtcactgagtacgcggtacagcgcaactatggcttccagatccacaccaaggatgctgtctataccttgtcggccatgacctcaggcatccggcggaactggatcgaggctctgagaaagaccgtacgtccaacttcagccccagatgtcaccaagctctcggactctaacaaggagaacgcgctgcacagctacagcacccagaagggccccctgaaggcaggggagcagcgggcgggctctgaggtcatcagccggggtggccctcggaaggcggacgggcagcgtcaggccttggactacgtggagctctcgccgctgacccaggcttccccgcagcgggcccgcaccccagcccgcactcctgaccgcctggccaagcaggaggagctggagcgggacctggcccagcgctccgaggagcggcgcaagtggtttgaggccacagacagcaggaccccagaggtgcctgctggtgaggggccgcgccggggcctgggtgcccccctgactgaggaccagcaaaaccggcttagtgaggagatcgagaagaagtggcaggagctggagaagctgcccctgcgggagaataagcgggtgcccctcactgccctgctcaaccaaagccgcggaanagcgccgagggcccccaagtgacgnccncnaggcactggaaaagnaggttcaggctctttcgggcccancttgnaggngntggcgtcctccaagggganggctcctcaaantggcctgaaaatcccangaaggatggcccnatccccccngggctanatnnncnangaagcatgtnancccaccctggnnaaaaatnnattncncccccccnncaggtaang

SEQ ID NO: 192 - DNA, 959 bp, Homo Sapiens
  misc_feature (1)..(1): n is a, c, g, or t
  misc_feature (705)..(705): n is a, c, g, or t
  misc_feature (787)..(787): n is a, c, g, or t
  misc_feature (792)..(792): n is a, c, g, or t
  misc_feature (799)..(799): n is a, c, g, or t
  misc_feature (840)..(840): n is a, c, g, or t
  misc_feature (861)..(861): n is a, c, g, or t
  misc_feature (876)..(876): n is a, c, g, or t
  misc_feature (878)..(878): n is a, c, g, or t
  misc_feature (883)..(883): n is a, c, g, or t
  misc_feature (908)..(908): n is a, c, g, or t
  misc_feature (911)..(911): n is a, c, g, or t
  misc_feature (914)..(914): n is a, c, g, or t
  misc_feature (917)..(918): n is a, c, g, or t
  misc_feature (931)..(931): n is a, c, g, or t
  misc_feature (938)..(939): n is a, c, g, or t
  misc_feature (947)..(948): n is a, c, g, or t
  misc_feature (953)..(954): n is a, c, g, or t
  misc_feature (958)..(958): n is a, c, g, or t
naattagagaaattactatgagaggatcgcatcaccatcaccatcacggatcctatttaggtgacactatagaatcgtcgacccacgcgtccgggatgaggactgtgtccactacccactgcccgagtttgccaaagagccgccgcagagagacaggtaccggctggacgatggccgccgcgtccgggacctggaccgagtgctcatgggctaccagacctacccgcaggccctcaccctcgtcttcgatgacgtgcaaggtcatgacctcatgggcagtgtcaccctggaccactttggggaggtgccaggtggcccggctagagccagccagggccgtgaagtccagtggcaggtgtttgtccccagtgctgagagcagagagaagctcatctcgctgttggctcgccagtgggaggccctgtgtggccgtgagctgcctgtcgagctcaccggctagcccaggccacagccagcctgtcgtgtccagcctgacgcctactggggcagggcagcaggcttttgtgttctctaaaaatgttttatcctccctttggtaccttaatttgactgtcctcgcagagaatgtgaacatgtgtgtgtgttgtgttaattctttctcatgttgggagtgagaatgccgggcccctcagggctgtcggtgtgctgtcagcctcccacaggtggtacagccgtgcacaccantgtcgtgtctgctgttgtgggaccgttgttaacacgtgacactgtgggtctgactttctcttctacacgtcctttcctgaantgtcnagtccantcctttgttgctgttgctgttgctgttgctgttgctgttgncatcttgctgctaatcctgangctggtacaaaatgnanattgnaactcccaccccatattgttttttnaantgnagnntcccctgatccanaaaatgnnaaaacccnnggggnnaggna

SEQ ID NO: 193 - DNA, 1081 bp, Homo Sapiens
  misc_feature (1)..(1): n is a, c, g, or t
  misc_feature (12)..(12): n is a, c, g, or t
  misc_feature (124)..(124): n is a, c, g, or t
  misc_feature (383)..(383): n is a, c, g, or t
  misc_feature (409)..(409): n is a, c, g, or t
  misc_feature (524)..(524): n is a, c, g, or t
  misc_feature (549)..(549): n is a, c, g, or t
  misc_feature (554)..(554): n is a, c, g, or t
  misc_feature (557)..(557): n is a, c, g, or t
  misc_feature (559)..(559): n is a, c, g, or t
  misc_feature (601)..(601): n is a, c, g, or t
  misc_feature (627)..(627): n is a, c, g, or t
  misc_feature (650)..(650): n is a, c, g, or t
  misc_feature (655)..(655): n is a, c, g, or t
  misc_feature (671)..(671): n is a, c, g, or t
  misc_feature (848)..(848): n is a, c, g, or t
  misc_feature (851)..(851): n is a, c, g, or t
  misc_feature (862)..(862): n is a, c, g, or t
  misc_feature (869)..(869): n is a, c, g, or t
  misc_feature (873)..(873): n is a, c, g, or t
  misc_feature (885)..(885): n is a, c, g, or t
  misc_feature (891)..(891): n is a, c, g, or t
  misc_feature (895)..(895): n is a, c, g, or t
  misc_feature (898)..(898): n is a, c, g, or t
  misc_feature (904)..(904): n is a, c, g, or t
  misc_feature (912)..(912): n is a, c, g, or t
  misc_feature (916)..(916): n is a, c, g, or t
  misc_feature (918)..(918): n is a, c, g, or t
  misc_feature (937)..(937): n is a, c, g, or t
  misc_feature (952)..(952): n is a, c, g, or t
  misc_feature (971)..(971): n is a, c, g, or t
  misc_feature (987)..(987): n is a, c, g, or t
  misc_feature (991)..(991): n is a, c, g, or t
  misc_feature (1000)..(1000): n is a, c, g, or t
  misc_feature (1002)..(1002): n is a, c, g, or t
  misc_feature (1006)..(1006): n is a, c, g, or t
  misc_feature (1012)..(1013): n is a, c, g, or t
  misc_feature (1015)..(1015): n is a, c, g, or t
  misc_feature (1022)..(1022): n is a, c, g, or t
  misc_feature (1029)..(1029): n is a, c, g, or t
  misc_feature (1038)..(1038): n is a, c, g, or t
  misc_feature (1046)..(1046): n is a, c, g, or t
  misc_feature (1052)..(1052): n is a, c, g, or t
  misc_feature (1063)..(1064): n is a, c, g, or t
  misc_feature (1066)..(1066): n is a, c, g, or t
  misc_feature (1068)..(1068): n is a, c, g, or t
  misc_feature (1073)..(1073): n is a, c, g, or t
  misc_feature (1077)..(1077): n is a, c, g, or t
naatagagaaanttaactatgagaggatcgcatcaccatcaccatcacgggatcctatttaggtgacactatagaatcgtcgacccacgcgtccggataaatacaccatgtatacggaaactanaaggacatcaccatgatgtggtagcttgtgacttttctcctgatggagcattactggctactgcatcttatgatactcgagtatatatctgggatccacataatggagacattctgatggaatttgggcacctgtttcccccacctactccaatatttgctggaggagcaaatgaccggtgggtacgatctgtatcttttagccatgatggactgcatgttgcaagccttgctgatgataaaatggtgaggttctgganaattgatgaggattatccagtgcaanttgcacctttgagcaatggtctttgctgtgccttctctactgatggcagtgttttagctgctgggacacatgacggaagtgtgtatttttgggccactccacggcaggtccctancctgcaacatttatgtcgcatgtcnatccnaanantgatgcccacccaagaaattcaggagctgccgattccttccnagcttttggagtttctctcgtatcgnatttagaagattctgccttcccnagtantagggactgacagaanatacttaacacaaacctcaagctttactgacttcaattatctgtttttaaagacgtagaaaatttatttaaatttgatatgttcttgtactgcattttgatcagttgagcttttaaaatattatttatacacaaatacaaataatttcccgaacatatcaaatataaaatttttttnaangatctaactgngaaaacntacntaccctgtacanatttanatanaancctgcnatatgttnaaangnacccttttgcttttctganttttagttccgaaangggaaaaaattgccttcanaaaaagcccccaaaangtancctttgctngnaaanggccanngnaaatttnaaaattncggggaacncctgaaantaaatngtaaaaaccgnncntnccaanattnaatt

SEQ ID NO: 194 - DNA, 1144 bp, Homo Sapiens
  misc_feature (1)..(1): n is a, c, g, or t
  misc_feature (879)..(879): n is a, c, g, or t
  misc_feature (891)..(891): n is a, c, g, or t
  misc_feature (918)..(918): n is a, c, g, or t
  misc_feature (955)..(955): n is a, c, g, or t
  misc_feature (967)..(967): n is a, c, g, or t
  misc_feature (976)..(976): n is a, c, g, or t
  misc_feature (994)..(994): n is a, c, g, or t
  misc_feature (1033)..(1033): n is a, c, g, or t
  misc_feature (1043)..(1043): n is a, c, g, or t
  misc_feature (1054)..(1055): n is a, c, g, or t
  misc_feature (1070)..(1070): n is a, c, g, or t
  misc_feature (1077)..(1077): n is a, c, g, or t
  misc_feature (1084)..(1085): n is a, c, g, or t
  misc_feature (1087)..(1087): n is a, c, g, or t
  misc_feature (1089)..(1089): n is a, c, g, or t
  misc_feature (1111)..(1111): n is a, c, g, or t
  misc_feature (1119)..(1119): n is a, c, g, or t
  misc_feature (1122)..(1122): n is a, c, g, or t
  misc_feature (1124)..(1124): n is a, c, g, or t
  misc_feature (1126)..(1126): n is a, c, g, or t
  misc_feature (1137)..(1137): n is a, c, g, or t
  misc_feature (1140)..(1141): n is a, c, g, or t
  misc_feature (1144)..(1144): n is a, c, g, or t
naattagagaaattactatgagaggatcgcatcaccatcaccatcacggatcctatttaggtgacactatagaatcgtcgacccacgcgtccgcgccaggccgaaccgcagcttcttggcttaggtacttctactcacagcggccgattccgaggccaactccagcaatggcttttgcaaatctgcggaaagtgctcatcagtgacagcctggacccttgctgccggaagatcttgcaagatggagggctgcaggtggtggaaaagcagaaccttagcaaagaggagctgatagcggagctgcaggactgtgaaggccttattgttcgctctgccaccaaggtgaccgctgatgtcatcaacgcagctgagaaactccaggtggtgggcagggctggcacaggtgtggacaatgtggatctggaggccgcaacaaggaagggcatcttggttatgaacacccccaatgggaacagcctcagtgccgcagaactcacttgtggaatgatcatgtgcctggccaggcagattccccaggcgacggcttcgatgaaggacggcaaatgggagcggaagaagttcatgggaacagagctgaatggaaagaccctgggaattcttggcctgggcaggattgggagagaggtagctacccggatgcagtcctttgggatgaagactatagggtatgaccccatcatttccccagaggtctcggcctcctttggtgttcagcagctgcccctggaggagatctggcctctctgtgatttcatcactgtgcacactcctctcctgccctccacgacaggcttgctgaatgacaacacctttgcccagtgcaagaagggggtgcgtgtggtgaactgtgcccgtgganggatcgtggacnaaggcgccctgctccgggcccctgcantctggccagtgtgccggggctgcactggacgtgtttnacggaaaaaccnccacgggancggggccttggtggaacnatgaaaaatgtcatcagctgtccccacctggggtgccancaccaaggangctcaaaaccnntgtggggagaaaatngctgttncatttcnngnanatggggaaagggaaatcccccncgggggtnggnangnccaggcccttnacnntgn

SEQ ID NO: 195 - DNA, 1179 bp, Homo Sapiens
  misc_feature (936)..(936): n is a, c, g, or t
  misc_feature (938)..(938): n is a, c, g, or t
  misc_feature (983)..(983): n is a, c, g, or t
  misc_feature (988)..(988): n is a, c, g, or t
  misc_feature (1052)..(1052): n is a, c, g, or t
  misc_feature (1054)..(1054): n is a, c, g, or t
  misc_feature (1067)..(1067): n is a, c, g, or t
  misc_feature (1092)..(1092): n is a, c, g, or t
  misc_feature (1096)..(1096): n is a, c, g, or t
  misc_feature (1098)..(1098): n is a, c, g, or t
  misc_feature (1101)..(1101): n is a, c, g, or t
  misc_feature (1110)..(1111): n is a, c, g, or t
  misc_feature (1117)..(1118): n is a, c, g, or t
  misc_feature (1132)..(1132): n is a, c, g, or t
  misc_feature (1150)..(1150): n is a, c, g, or t
  misc_feature (1156)..(1156): n is a, c, g, or t
  misc_feature (1160)..(1160): n is a, c, g, or t
  misc_feature (1172)..(1172): n is a, c, g, or t
  misc_feature (1177)..(1177): n is a, c, g, or t
taatagagaaattactatgagaggatcgcatcaccatcaccatcacggatcctatttaggtgacactatagaatcgtcgacccacgcgtccgaagacaaagccactgtgctaaccacggagcgcaagaagagagggaagactgtgcctgaggagctggtgaagccagaagagctcagcaaataccggcaggtggcatcccacgtggggttgcacagtgccagcattcctgggatcctggccctggacctctgcccgtccgacaccaacaagatcctcactggtggggcggataaaaatgtcgttgtgtttgacaaaagttctgaacaaatcctggctaccctcaaaggccataccaagaaggtcaccagcgtggtgtttcacccttcccaggacctggtgttttctgcttcccccgatgccactatcaggatttggtcggtccccaatgcctcttgtgtacaggtggttcgggcccatgagagtgctgtgacaggcctcagccttcatgccactggcgactatctcctgagctcctccgatgatcagtactgggctttctctgacatccagacagggcgtgtgctcaccaaggtgacagatgagacctccggctgctctctcacctgtgcacagttccaccctgacggactcatctttggaacaggaaccatggactctcagatcaagatctgggacttgaaggaacgtactaatgtggccaacttccctggccactcgggccccatcactagcatcgccttctctgagaatggttactacctggctacagcggctgatgactcctctgtcaagctctgggatctgcgcaagcttaagaactttaagactttgcagctggataacaactttgaggtaaagtcactgatctttgaccagagtggtacctacctggctcttgggggcacggaatgtcnanatctacatctgcaaacaatggacggaaattcttcactttacaaancatancggcctgaccacaggggtggccttcgggcatcacgccaagttcatcgcttcaacaggcatggananaaacctcaagttntacagcctgtaggccctggcccttntgangnaanctgggcctnntctccnntaaagggtaaaatnaggtttgggggggggggngggggnaatntttggggggganggggnct

SEQ ID NO: 196 - DNA, 825 bp, Homo Sapiens
tgagaggatcgcatcaccatcaccatcacggatcctatttaggtgacactatagaatcgtcgacccacgcgtccggcgtggggccgcgcgtctggacgtccctcgcgtcgggcccgacagcgcctgcgcactgcgccgccggctggggtgctgggggcggggcaggggcaggtgtagcctctgtgcctcgttgtcccctggcgctacccggacatctctcagggtgccggcaccatgaagatctggacttcggagcacgtctttgaccacccgtgggaaactgttacaacagctgcaatgcagaaatacccaaaccctatgaacccaagtgtggttggagttgatgtgttggacagacatatagatccctctggaaagttgcacagccacagacttctcagcacagagtggggactgccttccattgtgaagtctcttattggtgcagcaagaacgaaaacatatgtgcaagaacattctgtagttgatcctgtagagaaaacaatggaacttaaatctactaatatttcatttacaaacatggtttcagtagatgagagacttatatacaaaccacatcctcaggatccagaaaaaactgttttgacacaagaagccataattaccgtgaaaggagttagcctcagcagttaccttgaaggactgatggcaagtacgatatcctcaaatgctagtaaaggccgagaagcaatggaatgggtaatacataaattaaatgctgagattgaagaactgacagcctcagcaagaggaaccataagactccaatggcagcagcagcgtttgcagagaagtgatcgtgac

SEQ ID NO: 197 - DNA, 989 bp, Homo Sapiens
  misc_feature (2)..(2): n is a, c, g, or t
  misc_feature (784)..(784): n is a, c, g, or t
  misc_feature (882)..(882): n is a, c, g, or t
  misc_feature (908)..(908): n is a, c, g, or t
  misc_feature (930)..(930): n is a, c, g, or t
  misc_feature (957)..(957): n is a, c, g, or t
  misc_feature (967)..(989): n is a, c, g, or t
antagagaaattactatgagaggatcgcatcaccatcaccatcacggatcctatttaggtgacactatagaatcgtcgacccacgcgtccgagagactttcgcttccggctgccgcaggcgcttcgctggtgcaggtaagctccgcacactctcggccggtcccgagtccgactccctcaagggtgacgcgagctctgccctttaaccggaaacgtctccctgctcaccccacccccgcgcagacgcagtgctgagcacacagctaccggacaaagagtgacgcccggagctggagttatggcggctacggagccgatcttggcggccactgggagtcccgcggcggtgccaccggagaaactggaaggagccggttcgagctcagcccctgagcgtaactgtgtgggctcctcgctgccagaggcctcaccgcctgcccctgagccttccagtcccaacgccgcggtccctgaagccatccctacgccccgagctgcggcctccgcggccctggagctgcctctcgggcccgcacccgtgagcgtagcgcctcaggccgaagctgaagcgcgctccacaccaggccccgccggctctagactcggtcccgagacgttccgccagcgtttccggcagttccgctaccaggatgcggcgggtccccgggaggctttccggcagctgcgggagctgtcccgccagtggctgcggcctgacatccgcaccaaggagcagatcgtggagatgctggtgcaagagcagctgctcgccatcctgcccgangcggctcgggcccggcggatccgccgccgcacggatgtgcgcatcactggctgaacggtggaactgcgggcggccagggccgggcgctctgtgcggantggggccatgatcgggcccgggggcntgaacctgggaccccaccccgngttaatgaaaaatgaattttggcagcnccaaaaaaannnnnnnnnnnnnnnnnnnnnnn

SEQ ID NO: 198 - DNA, 1179 bp, Homo Sapiens
  misc_feature (889)..(889): n is a, c, g, or t
  misc_feature (913)..(913): n is a, c, g, or t
  misc_feature (919)..(919): n is a, c, g, or t
  misc_feature (931)..(931): n is a, c, g, or t
  misc_feature (955)..(955): n is a, c, g, or t
  misc_feature (998)..(998): n is a, c, g, or t
  misc_feature (1008)..(1008): n is a, c, g, or t
  misc_feature (1018)..(1018): n is a, c, g, or t
  misc_feature (1025)..(1025): n is a, c, g, or t
  misc_feature (1038)..(1038): n is a, c, g, or t
  misc_feature (1050)..(1050): n is a, c, g, or t
  misc_feature (1059)..(1059): n is a, c, g, or t
  misc_feature (1098)..(1098): n is a, c, g, or t
  misc_feature (1111)..(1111): n is a, c, g, or t
  misc_feature (1114)..(1114): n is a, c, g, or t
  misc_feature (1121)..(1121): n is a, c, g, or t
  misc_feature (1123)..(1123): n is a, c, g, or t
  misc_feature (1132)..(1132): n is a, c, g, or t
  misc_feature (1135)..(1135): n is a, c, g, or t
  misc_feature (1137)..(1137): n is a, c, g, or t
  misc_feature (1139)..(1139): n is a, c, g, or t
  misc_feature (1141)..(1141): n is a, c, g, or t
  misc_feature (1143)..(1143): n is a, c, g, or t
  misc_feature (1147)..(1147): n is a, c, g, or t
  misc_feature (1158)..(1159): n is a, c, g, or t
  misc_feature (1162)..(1162): n is a, c, g, or t
  misc_feature (1169)..(1169): n is a, c, g, or t
  misc_feature (1178)..(1179): n is a, c, g, or t
tagagaaattactatgagaggatcgcatcaccatcaccatcacggatcctatttaggtgacactatagaatcgtcgacccacgcgtccgggcggacacagctcccaggaacctccacgcccatggccactaggcagagggaatcctctatcacctcctgctgttccacctcgagctgcgacgcagacgacgagggcgtgcgcggcacctgcgaagatgcttccctgtgcaagaggtttgcagtaagcattggctactggcatgacccttacatacagcactttgtgagactgtctaaagagaggaaagcccctgaaatcaacagaggatattttgctcgagtccatggtgtcagtcagcttataaaggcatttctacggaagacagaatgtcattgtcaaattgtcaaccttggggcaggcatggataccaccttctggagattaaaggatgaagatcttctcccaagtaaatattttgaggttgactttccaatgattgtcacgagaaagctgcacagtatcaaatgcaagcctcccctatccagccccattctagaactgcattcagaggacacacttcagatggatggacacatactggattcaaagagatatgccgttattggagcagatctccgagacctgtctgaactggaagagaagctaaagaaatgtaacatgaatacacaattgccaacactcctgatagctgaatgtgtgctggtttacatgactccagagcagtccgcaaacctcctgaagtgggcagccaacagttttgagagagccatgttcataaactacgaacaggtgaacatgggtgatcggtttgggcagatcatgattgaaaacctgcggagacgccagtgtgacctggcgggagtgganacctgcaagtcattaaagtcacanaaagancggctcctgtcnaatgggtgggaaacagcatcggcngtcgacatgatggagttgtacaacaggttacctcgagctgaantgagcagaanaaaatccctngaattcntggataaatgganctgctggaacanctcatgcgnattactgcctttgctgggcaccaaaggagaaatgacctngggctgaagaaanaanttattantntgtcaaggnttntncnancnaaanccaaacccttnnccnctggagnaaactgaann

SEQ ID NO: 199 - DNA, 890 bp, Homo Sapiens
ctatgagaggatcgcatcaccatcaccatcacggatcctatttaggtgacactatagaatcgtcgacccacgcgtccgagaatactttgtggcctgaagttcaaaaactatatgggcacggttatgaaatattttgtgttacttgtaacagttcaaagactctgcttgcctcagcttgtaaggcagctaagaaagagcatgcagctatcattctttggaacactacatcttggaaacaggtgcagaatttagttttccacagtttgacagtcacgcagatggccttctcacctaatgagaagttcttactagctgtttccagagatcgaacctggtcattgtggaaaaagcaggatacaatctcacctgagttcgagccagtttttagtctttttgccttcaccaacaaaattacttctgtgcacagtagaattatttggtcttgtgattggagtcctgacagcaagtatttcttcactgggagtcgagacaaaaaggtggttgtctggggtgagtgtgactccactgatgactgtattgagcacaacattggcccctgctcctcagtcctggacgtgggtggggctgtgacagctgtcagcgtctgcccagtgctccacccttctcaacgatacgtggttgcagtaggattggagtgtggaaagatttgcttatatacctggaaaaagactgatcaagttccagaaataaatgactggacccactgtgtagaaacaagtcaaagccaaagtcatacactggctatcagaaaattatgctggaagaattgcagtggaaaaactgaacagaaggaagcagaaggtgctgagtggttacactttgcaagctgtggtgaagatcacactgtgaagatacacagagtcaataaa

SEQ ID NO: 200 - DNA, 1088 bp, Homo Sapiens
  misc_feature (749)..(749): n is a, c, g, or t
  misc_feature (821)..(821): n is a, c, g, or t
  misc_feature (827)..(827): n is a, c, g, or t
  misc_feature (851)..(851): n is a, c, g, or t
  misc_feature (866)..(866): n is a, c, g, or t
  misc_feature (904)..(904): n is a, c, g, or t
  misc_feature (924)..(924): n is a, c, g, or t
  misc_feature (935)..(935): n is a, c, g, or t
  misc_feature (937)..(937): n is a, c, g, or t
  misc_feature (964)..(964): n is a, c, g, or t
  misc_feature (967)..(967): n is a, c, g, or t
  misc_feature (970)..(970): n is a, c, g, or t
  misc_feature (977)..(977): n is a, c, g, or t
  misc_feature (982)..(982): n is a, c, g, or t
  misc_feature (985)..(985): n is a, c, g, or t
  misc_feature (1000)..(1000): n is a, c, g, or t
  misc_feature (1007)..(1007): n is a, c, g, or t
  misc_feature (1013)..(1013): n is a, c, g, or t
  misc_feature (1020)..(1020): n is a, c, g, or t
  misc_feature (1025)..(1025): n is a, c, g, or t
  misc_feature (1034)..(1034): n is a, c, g, or t
  misc_feature (1038)..(1038): n is a, c, g, or t
  misc_feature (1041)..(1041): n is a, c, g, or t
  misc_feature (1045)..(1045): n is a, c, g, or t
  misc_feature (1052)..(1052): n is a, c, g, or t
  misc_feature (1059)..(1059): n is a, c, g, or t
  misc_feature (1062)..(1062): n is a, c, g, or t
  misc_feature (1072)..(1073): n is a, c, g, or t
  misc_feature (1075)..(1075): n is a, c, g, or t
  misc_feature (1079)..(1079): n is a, c, g, or t
  misc_feature (1082)..(1082): n is a, c, g, or t
  misc_feature (1085)..(1085): n is a, c, g, or t
tagagaaattactatgagaggatcgcatcaccatcaccatcacggatcctatttaggtgacactatagaatcgtcgacccacgcgtccgcgggctgagcggtttcgagccggcgtcggggagcggcggtaccgggcggctgcggggctggctcgacccagctggaggtctcggcgtccgcgtcctgcggtgccctgggacccgccgacatgaatcccatcgtagtggtccacggcggcggagccggtcccatctccaaggatcggaaggagcgagtgcaccagggcatggtcagagccgccaccgtgggctacggcatcctccgggagggcgggagcgccgtggatgccgtagagggagctgtcgtcgccctggaagacgatcccgagttcaacgcaggttgtgggtctgtcttgaacacaaatggtgaggttgaaatggatgctagtatcatggatggaaaagacctgtctgcaggagcagtgtccgcagtccagtgtatagcaaatcccattaaacttgctcggcttgtcatggaaaagacacctcattgctttctgactgaccaaggcgcagcgcagtttgcagcagctatgggggttccagagattcctggagaaaaactggtgacagagagaaacaaaaagcgcctggaaaaagagaagcatgaaaaaggtgctcagaaaacagattgtcaaaaaaacttgggaaccgtgggtgctgttgccttggactgcaaagggaatgtancctacgcaacctccacaggcggtatcgttaataaaatggtcggccgcgttggggactcaccgtgtctagganctggangttatgccgacaatgacatcgganccgtctcaaccacangggcatggggaaagcatcctgaaggtgaacctggctanactcaccctgttccacatanaacaaggaaananggtaaaaaaaggctgcggaacctatcnttnggnttaaatnaaatncanggttaaaaggtttangtggccntcatcntggttancaaanaagaaaatngggnggnaaantgaaccnccccctnccntgcccttggnnancccnccnaanaaa

SEQ ID NO: 201 - DNA, 1343 bp, Homo Sapiens
  misc_feature (4)..(12): n is a, c, g, or t
  misc_feature (860)..(860): n is a, c, g, or t
  misc_feature (889)..(889): n is a, c, g, or t
  misc_feature (894)..(894): n is a, c, g, or t
  misc_feature (896)..(896): n is a, c, g, or t
  misc_feature (978)..(978): n is a, c, g, or t
  misc_feature (983)..(983): n is a, c, g, or t
  misc_feature (986)..(986): n is a, c, g, or t
  misc_feature (1000)..(1000): n is a, c, g, or t
  misc_feature (1002)..(1002): n is a, c, g, or t
  misc_feature (1023)..(1024): n is a, c, g, or t
  misc_feature (1040)..(1040): n is a, c, g, or t
  misc_feature (1050)..(1050): n is a, c, g, or t
  misc_feature (1053)..(1053): n is a, c, g, or t
  misc_feature (1056)..(1056): n is a, c, g, or t
  misc_feature (1060)..(1060): n is a, c, g, or t
  misc_feature (1097)..(1097): n is a, c, g, or t
  misc_feature (1107)..(1107): n is a, c, g, or t
  misc_feature (1117)..(1118): n is a, c, g, or t
  misc_feature (1124)..(1124): n is a, c, g, or t
  misc_feature (1129)..(1129): n is a, c, g, or t
  misc_feature (1137)..(1137): n is a, c, g, or t
  misc_feature (1142)..(1143): n is a, c, g, or t
  misc_feature (1167)..(1167): n is a, c, g, or t
  misc_feature (1169)..(1169): n is a, c, g, or t
  misc_feature (1179)..(1179): n is a, c, g, or t
  misc_feature (1181)..(1181): n is a, c, g, or t
  misc_feature (1186)..(1186): n is a, c, g, or t
  misc_feature (1191)..(1191): n is a, c, g, or t
  misc_feature (1202)..(1202): n is a, c, g, or t
  misc_feature (1212)..(1212): n is a, c, g, or t
  misc_feature (1229)..(1230): n is a, c, g, or t
  misc_feature (1237)..(1237): n is a, c, g, or t
  misc_feature (1250)..(1250): n is a, c, g, or t
  misc_feature (1254)..(1254): n is a, c, g, or t
  misc_feature (1263)..(1263): n is a, c, g, or t
  misc_feature (1266)..(1266): n is a, c, g, or t
  misc_feature (1271)..(1271): n is a, c, g, or t
  misc_feature (1275)..(1276): n is a, c, g, or t
  misc_feature (1286)..(1286): n is a, c, g, or t
  misc_feature (1294)..(1294): n is a, c, g, or t
  misc_feature (1300)..(1300): n is a, c, g, or t
  misc_feature (1307)..(1307): n is a, c, g, or t
  misc_feature (1314)..(1314): n is a, c, g, or t
  misc_feature (1323)..(1324): n is a, c, g, or t
  misc_feature (1328)..(1330): n is a, c, g, or t
  misc_feature (1341)..(1341): n is a, c, g, or t
ctgnnnnnnnnnaattagagaaattactatgagaggatcgcatcaccatcaccatcacggatcctatttaggtgacactatagaatcgtcgacccacgcgtccggccaggcctggctcgagatgccgaagtcgtgcgcggcccggcagtgctgcaaccgctacagcagccgcaggaagcagctcaccttccaccggtttccgttcagccgcccggagctgctgaaggaatgggtgctgaacatcggccggggcaacttcaagcccaagcagcacacggtcatctgctccgagcacttccggccagagtgcttcagcgcctttggaaaccgcaagaacctaaagcacaatgccgtgcccacggtgttcgcctttcaggaccccacacaggtgagggagaacacagaccctgccagtgagagaggaaatgccagctcttctcagaaagaaaaggtcctccctgaggcgggggccggagaggacagtcctgggagaaacatggacactgcacttgaagagcttcagttgcccccaaatgccgaaggccacgtaaaacaggtctcgccacggaggccgcaagcaacagaggctgttggccggccgactggccctgcaggcctgagaaggacccccaacaagcagccatctgatcacagctatgcccttttggacttagattccctgaagaaaaaactcttcctcactctgaaggaaaatgaaaagctccggaagcgcttgcaggcccagaggctggtgatgcgaaggatgtccagccgcctccgtgcttgcaaagggcaccagggactccaggccagacttgggccagagcagcagagctgagccccacaggctccggacgcanaggtggcagtggcaccagggccggcaganctttngnagctctggctgtggacatttttgtctgctgtggacactgaaaaagttggccatgaaggcctgcttggccggggatcgaaaanagtanccnaactccccggcganancctcaatgccgtctggggganngtttaaaaggcgtggncactaaggantgncanattntgtgaaccatgaaaaagctttttcctcccatgggtancaaaaatccnagcttgaagnntaattntgganccttttcnttttnnccaaccccaaaaaaaaaaattttngnaaacccccantnggggnaaatnctcccccaggnaaaaaacccntttaagggggcttggcnnttttggngggggaaagggtncccntccttcatnaancttgnaaanncctttggggnttttaagnaagaanccttttnccccccngggtgtgannggcnnnttaaaaaattntt

SEQ ID NO: 202 - DNA, 1023 bp, Homo Sapiens
  misc_feature (2)..(2): n is a, c, g, or t
  misc_feature (4)..(4): n is a, c, g, or t
  misc_feature (794)..(794): n is a, c, g, or t
  misc_feature (887)..(887): n is a, c, g, or t
  misc_feature (892)..(892): n is a, c, g, or t
  misc_feature (897)..(897): n is a, c, g, or t
  misc_feature (911)..(911): n is a, c, g, or t
  misc_feature (922)..(922): n is a, c, g, or t
  misc_feature (935)..(935): n is a, c, g, or t
  misc_feature (947)..(947): n is a, c, g, or t
  misc_feature (963)..(963): n is a, c, g, or t
  misc_feature (980)..(980): n is a, c, g, or t
  misc_feature (982)..(982): n is a, c, g, or t
  misc_feature (988)..(988): n is a, c, g, or t
  misc_feature (990)..(990): n is a, c, g, or t
  misc_feature (993)..(993): n is a, c, g, or t
  misc_feature (1003)..(1003): n is a, c, g, or t
  misc_feature (1005)..(1006): n is a, c, g, or t
  misc_feature (1008)..(1008): n is a, c, g, or t
  misc_feature (1010)..(1010): n is a, c, g, or t
  misc_feature (1012)..(1012): n is a, c, g, or t
  misc_feature (1016)..(1017): n is a, c, g, or t
  misc_feature (1021)..(1021): n is a, c, g, or t
antngagaaattactatgagaggatcgcatcaccatcaccatcacggatcctatttaggtgacactatagaatcgtcgacccacgcgtccgcccacgcgtccgggatccgccgcgcagtgccagcgccagcgccagacccgcgccccgcgctctccggcccgtcgcctgccttgggactcgcgagcccgcactcccgccctgcctgttcgctgcccgagtatggagctgctgtgttgcgaaggcacccggcacgcgccccgggccgggccggacccgcggctgctgggggaccagcgtgtcctgcagagcctgctccgcctggaggagcgctacgtaccccgcgcctcctacttccagtgcgtgcagcgggagatcaagccgcacatgcggaagatgctggcttactggatgctggaggtatgtgaggagcagcgctgtgaggaggaagtcttccccctggccatgaactacctggatcgctacctgtcttgcgtccccacccgaaaggcgcagttgcagctcctgggtgcggtctgcatgctgctggcctccaagctgcgcgagaccacgcccctgaccatcgaaaaactgtgcatctacaccgaccacgctgtctctccccgccagttgcgggactgggaggtgctggtcctagggaagctcaagtgggacctggctgctgtgattgcacatgatttcctggccttcattctgcaccggctctctctgccccgtgaccgacaggccttggtcaaaaagcatgcccagacctttttggccctctgtgctacanattatacctttgccatgtacccgccatccatgatcgccacgggcagcattggggctgcagtgcaaggcctgggtgcctgctccatgtccgggnatganctcanaaaactgctggcanggatcactggnactgaaattggantgcctgcgggcntgtcaggaacaaatcnaaactgcactcaggganancctcangnaancttttaaaananntncnanccanngccnaa

SEQ ID NO: 203 - DNA, 1008 bp, Homo Sapiens
  misc_feature (4)..(4): n is a, c, g, or t
  misc_feature (704)..(704): n is a, c, g, or t
  misc_feature (795)..(795): n is a, c, g, or t
  misc_feature (810)..(810): n is a, c, g, or t
  misc_feature (827)..(827): n is a, c, g, or t
  misc_feature (843)..(844): n is a, c, g, or t
  misc_feature (851)..(852): n is a, c, g, or t
  misc_feature (856)..(856): n is a, c, g, or t
  misc_feature (868)..(868): n is a, c, g, or t
  misc_feature (872)..(872): n is a, c, g, or t
  misc_feature (874)..(874): n is a, c, g, or t
  misc_feature (909)..(909): n is a, c, g, or t
  misc_feature (912)..(912): n is a, c, g, or t
  misc_feature (917)..(918): n is a, c, g, or t
  misc_feature (931)..(931): n is a, c, g, or t
  misc_feature (935)..(935): n is a, c, g, or t
  misc_feature (937)..(937): n is a, c, g, or t
  misc_feature (945)..(945): n is a, c, g, or t
  misc_feature (951)..(951): n is a, c, g, or t
  misc_feature (962)..(962): n is a, c, g, or t
  misc_feature (964)..(964): n is a, c, g, or t
  misc_feature (966)..(966): n is a, c, g, or t
  misc_feature (982)..(982): n is a, c, g, or t
  misc_feature (985)..(986): n is a, c, g, or t
  misc_feature (994)..(994): n is a, c, g, or t
  misc_feature (996)..(997): n is a, c, g, or t
  misc_feature (1003)..(1003): n is a, c, g, or t
  misc_feature (1005)..(1005): n is a, c, g, or t
  misc_feature (1008)..(1008): n is a, c, g, or t
aaanttagagaaattactatgagaggatcgcatcaccatcaccatcacggatcctatttaggtgacactatagaatcgtcgacccacgcgtccgcccacgcgtccgcccacgcgtccgcccacgcgtccgtgaaggtgttcgtctgctgcgcctccacatcgcactccggggagaagccggtccccactctcccccagttcaccatgggccccaatatgaagatcaacgtgctggaagactttgagggagagaaccctcaggtgcccaagcttgagaagagcatcagcgggaccagccccaaacgggaacacctgcccctggccgtgggcatcgccttcttcctcatgacgttcttggcctcctagctctgccccctcccctggggggggagagatggggcggggcttggaaggagcagggagcctttggcctctccaagggaagcctagtgggcctagacccctcctcccatggctagaagtggggcctgcaccatacatctgtgtccgccccctctaccccttccccccacgtagggcactgtagtggaccaagcacggggacagccatgggtcccgggcggccttgtggctctggtaatgtttggtaccaaacttgggggccaaaaagggcagtgctcaggactccctggcccctggtacctttccctgactcctggtgccctctccctttgtccccccanagagacatatgcccccagagagagcaaatcgaagcgtgggaggcacccccattgctctcctccaggggcagaacatggggagggggactanatgggcaaggggcancactgcctgctgcttcnttcccctgtttacagnnaataaannagtnctcctcccccantccnanttccaggattggggtttggattgaaaccaatttanaantaaanncccctgggggggngggnantggaaaangatggnaaggggtgggnantnggggtgccaggaaggnatnnaaaaaatntnntatttntnttn

SEQ ID NO: 204 - DNA, 1179 bp, Homo Sapiens
  misc_feature (800)..(800): n is a, c, g, or t
  misc_feature (926)..(926): n is a, c, g, or t
  misc_feature (943)..(943): n is a, c, g, or t
  misc_feature (994)..(994): n is a, c, g, or t
  misc_feature (1051)..(1051): n is a, c, g, or t
  misc_feature (1058)..(1058): n is a, c, g, or t
  misc_feature (1063)..(1063): n is a, c, g, or t
  misc_feature (1068)..(1068): n is a, c, g, or t
  misc_feature (1070)..(1070): n is a, c, g, or t
  misc_feature (1079)..(1079): n is a, c, g, or t
  misc_feature (1081)..(1081): n is a, c, g, or t
  misc_feature (1083)..(1084): n is a, c, g, or t
  misc_feature (1094)..(1094): n is a, c, g, or t
  misc_feature (1101)..(1102): n is a, c, g, or t
  misc_feature (1104)..(1104): n is a, c, g, or t
  misc_feature (1106)..(1106): n is a, c, g, or t
  misc_feature (1110)..(1110): n is a, c, g, or t
  misc_feature (1120)..(1120): n is a, c, g, or t
  misc_feature (1126)..(1127): n is a, c, g, or t
  misc_feature (1152)..(1152): n is a, c, g, or t
  misc_feature (1156)..(1156): n is a, c, g, or t
  misc_feature (1169)..(1169): n is a, c, g, or t
  misc_feature (1173)..(1173): n is a, c, g, or t
tagagaaattactatgagaggatcgcatcaccatcaccatcacggatcctatttaggtgacactatagaatcgtcgacccacgcgtccgatccagcaagaactgcacaagaaacggagtcagccggagaacaaggagtggtcttccactgcctcacaggaggatggaggcccacaacgcgtctgccccattcaacttcaccctgccacccaactttggcaagcgccccacagacctggcactgagcgtcatcctggtgttcatgttgttcttcatcatgctctcgctgggctgcaccatggagttcagcaagatcaaggctcacttatggaagcctaaagggctggccatcgccctggtggcacagtatggcatcatgcccctcacggcctttgtgctgggcaaggtcttccggctgaagaacattgaggcactggccatcttggtctgtggctgctcacctggagggaacctgtccaatgtcttcagtctggccatgaagggggacatgaacctcagcattgtgatgaccacctgctccaccttctgtgcccttggcatgatgcctctcctcctgtacatctactccagggggatctatgatggggacctgaaggacaaggtgccctataaaggcatcgtgatatcactggtcctggttctcattccttgcaccatagggatcgtcctcaaatccaaacggccacaatacatgcgctatgtcatcaagggagggatgatcatcattctcttgtgcagtgtggccgtcacagttctctctgccatcaatgtggggaaaancatcatgtttgccatgacaccactcttgattgccacctcctccctgatgccttttattggctttctgctgggttatgttctctctgctctcttctgcctcaatggacggtgcaaacgcactgtcancatggaaactggatgcnaaaatgtccaactctgttccaccatcctcaatgtggcctttccacctgaantcattggaccacttttcttctttccccccctctaaatgattttccagcttggaaaanggcttcncctcnttgcnanttttggggncnannaaaattcaanactcccnngnanaaanaaaaatgatntacccnnctgcccaactgaaaaaaaaattccngaanttggggaaaaggncccnaaaaag

SEQ ID NO: 205 - DNA, 1150 bp, Homo Sapiens
  misc_feature (874)..(874): n is a, c, g, or t
  misc_feature (879)..(879): n is a, c, g, or t
  misc_feature (956)..(956): n is a, c, g, or t
  misc_feature (965)..(965): n is a, c, g, or t
  misc_feature (1039)..(1039): n is a, c, g, or t
  misc_feature (1041)..(1041): n is a, c, g, or t
  misc_feature (1051)..(1052): n is a, c, g, or t
  misc_feature (1061)..(1061): n is a, c, g, or t
  misc_feature (1064)..(1064): n is a, c, g, or t
  misc_feature (1071)..(1071): n is a, c, g, or t
  misc_feature (1074)..(1074): n is a, c, g, or t
  misc_feature (1082)..(1082): n is a, c, g, or t
  misc_feature (1084)..(1085): n is a, c, g, or t
  misc_feature (1087)..(1087): n is a, c, g, or t
  misc_feature (1089)..(1089): n is a, c, g, or t
  misc_feature (1092)..(1092): n is a, c, g, or t
  misc_feature (1100)..(1100): n is a, c, g, or t
  misc_feature (1104)..(1104): n is a, c, g, or t
  misc_feature (1114)..(1114): n is a, c, g, or t
  misc_feature (1119)..(1119): n is a, c, g, or t
  misc_feature (1121)..(1121): n is a, c, g, or t
  misc_feature (1125)..(1125): n is a, c, g, or t
  misc_feature (1144)..(1144): n is a, c, g, or t
  misc_feature (1149)..(1149): n is a, c, g, or t
agaaattactatgagaggatcgcatcaccatcaccatcacggatcctatttaggtgacactatagaatcgtcgacccacgcgtccgggaagacacagatgctgttgggcctgagccactggttccttcaccacaacctgtacctgaggtgcccagcctggaccccaccgtgctgccactctactccctggggccctcagggcagttggcagagacgccggctgaggtgttccaggccctggagcagctggggcaccaagcctttcgccctgggcaggagcgtgcagtcatgcggatcctgtctggcatctccacgctgctggtgctgcctacaggtgccggcaagtccctgtgctaccagctcccagcgctgctctacagccggcgcagcccctgcctcacgttggtcgtctctcccctgctgtcactcatggatgaccaggtgtctggcctgccaccgtgtctcaaggcggcctgcatacactcgggcatgaccaggaagcaacgggaatctgtcctgcagaagattcgggcagcccaggtacacgtgctgatgctgacacctgaggcactggtgggggcgggaggcctccctccagccgcacagctgcctccagttgcttttgcctgcattgatgaggcccactgcctctcccagtggtcccacaacttccggccctgctacctgcgcgtctgcaaggtgcttcgggagcgcatgggcgtgcactgcttcctgggcctcacagccacagccacacgccgcactgccagtgacgtggcacagcacctggctgtggctgaagagcctgacctccacgggccagccccagttcccaccaacctgcacctttccgtgtccatggacagggacacanaccangcactgttgacgctgctgcaaggcaaacgttttcaaacctcgattccattatcatttactgcaaccggcgcgagganacaaaacgnatcgctgcgctcctccaaactgcctgcacgcaacctgggttccagggtctgaagtcgtgcccccaaaaccaaancnaagcctacanncggcatgtncanccggaanggnggcggtanannancnttntgcaggcnattncggggggggngccangnggcntttggaaggggttgaccgncaaant

SEQ ID NO: 206 - DNA, 1179 bp, Homo Sapiens
  misc_feature (856)..(856): n is a, c, g, or t
  misc_feature (879)..(879): n is a, c, g, or t
  misc_feature (885)..(885): n is a, c, g, or t
  misc_feature (903)..(903): n is a, c, g, or t
  misc_feature (935)..(935): n is a, c, g, or t
  misc_feature (942)..(942): n is a, c, g, or t
  misc_feature (946)..(946): n is a, c, g, or t
  misc_feature (958)..(958): n is a, c, g, or t
  misc_feature (960)..(960): n is a, c, g, or t
  misc_feature (980)..(980): n is a, c, g, or t
  misc_feature (982)..(982): n is a, c, g, or t
  misc_feature (993)..(993): n is a, c, g, or t
  misc_feature (996)..(996): n is a, c, g, or t
  misc_feature (1006)..(1006): n is a, c, g, or t
  misc_feature (1012)..(1012): n is a, c, g, or t
  misc_feature (1036)..(1036): n is a, c, g, or t
  misc_feature (1053)..(1053): n is a, c, g, or t
  misc_feature (1058)..(1058): n is a, c, g, or t
  misc_feature (1061)..(1061): n is a, c, g, or t
  misc_feature (1081)..(1081): n is a, c, g, or t
  misc_feature (1087)..(1087): n is a, c, g, or t
  misc_feature (1098)..(1098): n is a, c, g, or t
  misc_feature (1106)..(1106): n is a, c, g, or t
  misc_feature (1121)..(1121): n is a, c, g, or t
  misc_feature (1127)..(1127): n is a, c, g, or t
  misc_feature (1131)..(1131): n is a, c, g, or t
  misc_feature (1147)..(1147): n is a, c, g, or t
  misc_feature (1154)..(1154): n is a, c, g, or t
  misc_feature (1159)..(1159): n is a, c, g, or t
  misc_feature (1162)..(1162): n is a, c, g, or t
  misc_feature (1175)..(1175): n is a, c, g, or t
agagaaattactatgagaggatcgcatcaccatcaccatcacggatcctatttaggtgacactatagaatcgtcgacccacgcgtccgcggttgcgagcgctgtagggagcctgtgctgtgccgcgcagttaggcagcagcagccgcggagcagtagccgccgtgggagggagccatgaagcattacgaggtggagattctggacgcaaagacaagggagaagctgtgtttcttggacaagagctgacgtccctgcgcctgtgcttcccccaggtggagccccacgccaccattgcggagatcaagaacctcttcactaagacccatccgcagtggtaccccgcccgccagtccctccgcctggaccccaagggcaagtccctgaaggatgaggatgttctgcagaagctgcccgtgggcaccacggccacactgtacttccgggacctgggggcccagatcagctgggtgacggtcttcctaacagagtacgcggggccccttttcatctacctgctcttctacttccgagtgcccttcatctatggccacaaatatgactttacgtccagtcggcatacagtggtgcacctcgcctgcatctgtcactcattccactacatcaagcgcctgctggagacgctcttcgtgcaccgcttctcccatggcactatgcctttgcgcaacatcttcaagaactgcacctactactggggcttcgccgcgtggatggcctattacatcaatcaccctctctacactccccctacctacggagctcagcaggtgaaactggcgctcgccatctttgtgatctgccagctcggcaacttctccatccacatggccctgcggnacctgcggcccgctgggtccaanacgcgnaagatcccataccccacnaagaaccccttcacgtggctcttcctgctggngtcctgncccnactacacctacnangtggggtcctggatcggttncnccatcatgacncantgtctcccantggccntgttctccctggggggcttccccnaaaagaccatttgggcnaaggnaancaccgcactacctgaaggantccggnataaccgcccntgggaagnccatatcccttctgntttganggtnaccctggtgaggtcanccctcanccggnggnatttggggaagangggg

SEQ ID NO: 207 - DNA, 1217 bp, Homo Sapiens
  misc_feature (905)..(905): n is a, c, g, or t
  misc_feature (927)..(927): n is a, c, g, or t
  misc_feature (935)..(935): n is a, c, g, or t
  misc_feature (956)..(956): n is a, c, g, or t
  misc_feature (961)..(961): n is a, c, g, or t
  misc_feature (983)..(983): n is a, c, g, or t
  misc_feature (987)..(987): n is a, c, g, or t
  misc_feature (1001)..(1001): n is a, c, g, or t
  misc_feature (1014)..(1014): n is a, c, g, or t
  misc_feature (1019)..(1019): n is a, c, g, or t
  misc_feature (1037)..(1039): n is a, c, g, or t
  misc_feature (1054)..(1054): n is a, c, g, or t
  misc_feature (1060)..(1060): n is a, c, g, or t
  misc_feature (1062)..(1062): n is a, c, g, or t
  misc_feature (1075)..(1075): n is a, c, g, or t
  misc_feature (1084)..(1084): n is a, c, g, or t
  misc_feature (1091)..(1091): n is a, c, g, or t
  misc_feature (1097)..(1097): n is a, c, g, or t
  misc_feature (1102)..(1102): n is a, c, g, or t
  misc_feature (1107)..(1107): n is a, c, g, or t
  misc_feature (1109)..(1109): n is a, c, g, or t
  misc_feature (1124)..(1124): n is a, c, g, or t
  misc_feature (1129)..(1129): n is a, c, g, or t
  misc_feature (1145)..(1145): n is a, c, g, or t
  misc_feature (1154)..(1154): n is a, c, g, or t
  misc_feature (1157)..(1157): n is a, c, g, or t
  misc_feature (1160)..(1160): n is a, c, g, or t
  misc_feature (1166)..(1167): n is a, c, g, or t
  misc_feature (1170)..(1170): n is a, c, g, or t
  misc_feature (1174)..(1174): n is a, c, g, or t
  misc_feature (1184)..(1184): n is a, c, g, or t
  misc_feature (1200)..(1201): n is a, c, g, or t
  misc_feature (1208)..(1208): n is a, c, g, or t
  misc_feature (1211)..(1211): n is a, c, g, or t
  misc_feature (1214)..(1216): n is a, c, g, or t
aatagagaaattactatgagaggatcgcatcaccatcaccatcacggatcctatttaggtgacactatagaatcgtcgacccacgcgtccgcacctccctcctccaacggtattaatgaggagttgtcagaagtcttacagactttacaggatgaatttgggcaaatgagctttgatcaccagcagcttgcaaaacttatccaggagtcgccaaccgttgaactgaaagacaagttggagtgtgaattggaggcattagtgggaaggatggaagcaaaagccaaccaaataactaaagttcgaaaataccaagcccagctggagaaacagaagttagagaagcagaagaaggaattaaaagctaccaaaaagactcttgatgaagaaagaaacagcagcagccgttctggaatcacagggaccacaaataagaaagattttatgaaactgagacctggagaaaaaaggagaaaaaatcttcagttattgaaggacatgcaaagcatacagaattcattacaaagcagtagtttgtgttgggattactgactcataaccaggtcagaaattttattcagataatctgtacctcatcaatcagatgatgacaatttacttcccaggtctcatactcacttatgttggaattaattaatagcaggtgttaaaggacccaggcttcattacacaggcttttcatgtatgcaggatgactcaatgttaaagcatttaaatggaaaccaggggagttttaaagcccgagaaaccacacataatcttttgttgagatgagtttgctgtactgacgctgcactttgtaaacagattaccagttttttacttgtgggtgtgattttttaaaatagttctttatatataattaaaaattaggtttaaatttttcnaaatatgagactatgctatagncagtgctngcttgaaaagtctcatttttnaatcnccctggcatgaggggccccttncccntttccaaaccaccnttaaacatccttngtttnactatgggggagttttcnnnttttaaaaatccttntttttncnaggattttttttngcttttggnctttccnaacttngatcngggtnanggcccctggaatgcnttttnaaccggtaattttttnaagaccccnccntcnttttgnnttntttnttaaaaattnaaagggtttttgaagnntaacaanttnccnnna

SEQ ID NO: 208 - DNA, 1179 bp, Homo Sapiens
  misc_feature (821)..(821): n is a, c, g, or t
  misc_feature (839)..(839): n is a, c, g, or t
  misc_feature (857)..(857): n is a, c, g, or t
  misc_feature (881)..(881): n is a, c, g, or t
  misc_feature (896)..(896): n is a, c, g, or t
  misc_feature (908)..(908): n is a, c, g, or t
  misc_feature (947)..(947): n is a, c, g, or t
  misc_feature (967)..(967): n is a, c, g, or t
  misc_feature (970)..(970): n is a, c, g, or t
  misc_feature (981)..(981): n is a, c, g, or t
  misc_feature (992)..(992): n is a, c, g, or t
  misc_feature (1007)..(1007): n is a, c, g, or t
  misc_feature (1015)..(1015): n is a, c, g, or t
  misc_feature (1022)..(1022): n is a, c, g, or t
  misc_feature (1049)..(1050): n is a, c, g, or t
  misc_feature (1073)..(1073): n is a, c, g, or t
  misc_feature (1078)..(1078): n is a, c, g, or t
  misc_feature (1089)..(1089): n is a, c, g, or t
  misc_feature (1098)..(1098): n is a, c, g, or t
  misc_feature (1110)..(1110): n is a, c, g, or t
  misc_feature (1119)..(1119): n is a, c, g, or t
  misc_feature (1128)..(1128): n is a, c, g, or t
  misc_feature (1139)..(1139): n is a, c, g, or t
  misc_feature (1141)..(1141): n is a, c, g, or t
  misc_feature (1143)..(1143): n is a, c, g, or t
  misc_feature (1148)..(1148): n is a, c, g, or t
  misc_feature (1161)..(1161): n is a, c, g, or t
  misc_feature (1167)..(1167): n is a, c, g, or t
  misc_feature (1174)..(1174): n is a, c, g, or t
gaatagagaaattactatgagaggatcgcatcaccatcaccatcacggatcctatttaggtgacactatagaatcgtcgacccacgcgtccggggatggcgatggcgtacttggcttggagactggcgcggcgttcgtgtccgaggtcactagtttcccggtagttcagctgcacatgaatagaacagcaatgagagccagtcagaaggactttgaaaattcaatgaatcaagtgaaactcttgaaaaaggatccaggaaacgaagtgaagctaaaactctacgcgctatataagcaggccactgaaggaccttgtaacatgcccaaaccaggtgtatttgacttgatcaacaaggccaaatgggacgcatggaatgcccttggcagcctgcccaaggaagctgccaggcagaactatgtggatttggtgtccagtttgagtccttcattggaatcctctagtcaggtggagcctggaacagacaggaaatcaactgggtttgaaactctggtggtgacctccgaagatggcatcacaaagatcatgttcaaccggcccaaaaagaaaaatgccataaacactgagatgtatcatgaaattatgcgtgcacttaaagctgccagcaaggatgactcaatcatcactgttttaacaggaaatggtgactattacagtagtgggaatgatctgactaacttcactgatattccccctggtggagtagaggagaaagctaaaaataatgccgttttactgagggaatttgtgggctgttttatagattttcctaagcctctgattgcagtggtcaatggtccanctgtgggcatctccgtcnccctccttgggctattcnaatgcccgtgtatgcatctgacangggcaacattttcanacaccattttantccccctaaggcccaaagtccggaaaggatgcctccctnttacaccttttcccgaaaanaanggaacccccancccaaggcaanaaaaaaatgctttantttttggnaaaaaanttaacaagcggggaaaaggcatttggnncaaagaacttgtttaccggaaanttttnccctgaaaaanccctttttnaaaaaaaaattngggacccancctgaaagnaatttgcaaancntnccccnaattgcccttggnaatttncaaaaanggtaa

SEQ ID NO: 209 - DNA, 1271 bp, Homo Sapiens
  misc_feature (3)..(3): n is a, c, g, or t
  misc_feature (848)..(848): n is a, c, g, or t
  misc_feature (891)..(891): n is a, c, g, or t
  misc_feature (900)..(900): n is a, c, g, or t
  misc_feature (918)..(918): n is a, c, g, or t
  misc_feature (924)..(924): n is a, c, g, or t
  misc_feature (930)..(930): n is a, c, g, or t
  misc_feature (938)..(938): n is a, c, g, or t
  misc_feature (944)..(944): n is a, c, g, or t
  misc_feature (1005)..(1005): n is a, c, g, or t
  misc_feature (1033)..(1033): n is a, c, g, or t
  misc_feature (1043)..(1043): n is a, c, g, or t
  misc_feature (1051)..(1051): n is a, c, g, or t
  misc_feature (1059)..(1059): n is a, c, g, or t
  misc_feature (1069)..(1069): n is a, c, g, or t
  misc_feature (1088)..(1088): n is a, c, g, or t
  misc_feature (1091)..(1091): n is a, c, g, or t
  misc_feature (1094)..(1094): n is a, c, g, or t
  misc_feature (1106)..(1108): n is a, c, g, or t
  misc_feature (1110)..(1110): n is a, c, g, or t
  misc_feature (1114)..(1114): n is a, c, g, or t
  misc_feature (1126)..(1126): n is a, c, g, or t
  misc_feature (1142)..(1142): n is a, c, g, or t
  misc_feature (1144)..(1144): n is a, c, g, or t
  misc_feature (1156)..(1156): n is a, c, g, or t
  misc_feature (1161)..(1161): n is a, c, g, or t
  misc_feature (1163)..(1163): n is a, c, g, or t
  misc_feature (1165)..(1165): n is a, c, g, or t
  misc_feature (1205)..(1207): n is a, c, g, or t
  misc_feature (1209)..(1209): n is a, c, g, or t
  misc_feature (1212)..(1212): n is a, c, g, or t
  misc_feature (1227)..(1227): n is a, c, g, or t
  misc_feature (1245)..(1245): n is a, c, g, or t
  misc_feature (1249)..(1249): n is a, c, g, or t
  misc_feature (1253)..(1253): n is a, c, g, or t
  misc_feature (1261)..(1261): n is a, c, g, or t
tanagaaattactatgagaggatcgcatcaccatcaccattcacggatcctatttaggtgacactatagaatcgtcgacccacgcgtccggtcggagctcggagctgctgcttctggttctcttgtggccgccgtcgctgtccggctgccttgggctgccgaacagacaaggcgtgggccacagcacctcagaagccgacgcagctcgacgcaggggccggcaggagggtgggcgatcgcgtgtcggagggcgccgcgcgggcaggcgggcgggcgccagagggggaaagaggcgggggcggcgggtcagccgctggccgggccggccggggaatgtcgatgcctgacgcgatgccgctgcccggggtcggggaggagctgaagcaggccaaggagatcgaggacgccgagaagtactccttcatggccaccgtcaccaaggcgcccaagaagcaaatccagtttgctgatgacatgcaggagttcaccaaattccccaccaaaactggccgaagatctttgtctcgctcgatctcacagtcctccactgacagctacagttcagctgcatcctacacagatagctctgatgatgaggtttctccccgagagaagcagcaaaccaactccaagggcagcagcaatttctgtgtgaagaacatcaagcaggcagaatttggacgccgggagattgagattgcagagcaagacatgtctgctctgatttcactcaggaaacgtgctcagggggagaagcccttggctggtgctaaaatagtgggctgtacacacatcacagcccagacagcggtgttgattgagacactctgtgcccctggggggctcantgccgctggtctgcttgtaacatctactcaactcaaaatgaantaactgcancactggctgaagctgganttgcantgttcncttggaanggcgantcaaaaaataacttctggtggtgtattgaccgcttttgtgaacatggatggggtggcaggncaaaatgatcctggatgatgggggaaantttacccccntgggtttnaaaaaaantatccaaacntttttaaaaaaaatccaangcnttntggaaaaaaacnnnantggntttccaggtttntatcaacttcccaaantnggaaactttttntttcngncnaaaacttaattattttttacaaaaaaaattttaaaaattnnntnctnccaaaaatccttttnaatgccttaaaaaaaacnaaantttnttttttgnggaaaaaatg

SEQ ID NO: 210 - DNA, 1179 bp, Homo Sapiens
  misc_feature (932)..(932): n is a, c, g, or t
  misc_feature (939)..(939): n is a, c, g, or t
  misc_feature (955)..(955): n is a, c, g, or t
  misc_feature (962)..(962): n is a, c, g, or t
  misc_feature (995)..(996): n is a, c, g, or t
  misc_feature (1001)..(1001): n is a, c, g, or t
  misc_feature (1015)..(1015): n is a, c, g, or t
  misc_feature (1020)..(1020): n is a, c, g, or t
  misc_feature (1027)..(1027): n is a, c, g, or t
  misc_feature (1029)..(1029): n is a, c, g, or t
  misc_feature (1038)..(1038): n is a, c, g, or t
  misc_feature (1046)..(1046): n is a, c, g, or t
  misc_feature (1051)..(1051): n is a, c, g, or t
  misc_feature (1060)..(1060): n is a, c, g, or t
  misc_feature (1062)..(1062): n is a, c, g, or t
  misc_feature (1083)..(1083): n is a, c, g, or t
  misc_feature (1090)..(1090): n is a, c, g, or t
  misc_feature (1094)..(1094): n is a, c, g, or t
  misc_feature (1097)..(1097): n is a, c, g, or t
  misc_feature (1106)..(1107): n is a, c, g, or t
  misc_feature (1112)..(1112): n is a, c, g, or t
  misc_feature (1122)..(1122): n is a, c, g, or t
  misc_feature (1131)..(1131): n is a, c, g, or t
  misc_feature (1140)..(1140): n is a, c, g, or t
  misc_feature (1145)..(1146): n is a, c, g, or t
  misc_feature (1157)..(1157): n is a, c, g, or t
  misc_feature (1169)..(1170): n is a, c, g, or t
  misc_feature (1178)..(1178): n is a, c, g, or t
agagaaattactatgagaggatcgcatcaccatcaccatcacggatcctatttaggtgacactatagaatcgtcgacccacgcgtccggtaaactggaagatattgcaaatgcagcgttagcagctagtgcagtaacacaagtagccaaggtttttgaccaatatctcaattttattactttggaagatgatatgtttgtattatgtaatcaaaataaggagcttgtttcatatcgtgccattaacaggccagatatcacagacacggaaatggaaactgttatggacactatagttgacagcctcttctgcttttttgttactctgggtgctgttcctataatcagatgttcaagaggaacagcagcagaaatggtagcagtgaaactagacaagaaacttcgagaaaatctaagagatgcaagaaacagtctttttacaggtgatacacttggagctggccaattcagcttccagaggcccttattagtccttgttgacagaaacatagatttggcaactcctttacatcatacttggacatatcaagcattggtgcacgatgtactggatttccatttaaacagggttaatttggaagaatcttcaggagtggaaaactctccagctggtgctagaccaaagagaaaaaacaagaagtcttatgatttaactccggttgataaattttggcaaaaacataaaggaagtccattcccagaagttgcagaatcagttcagcaagaactagaatcttacagagcacaggaagatgaggtcaaacgacttaaaagcattatgggactagaaggggaagatgaaggagccataagtatgctttctgacaataccgctaagctaacatcagctgttagttctttgccagaactccttgagaaaaaagacttattgatctccatacaatgttgccnctgctgnttaaaacatataaagncagaaantggatgtatattttgaatatgaaaaaaaaatanngagcnaaactactctgganaatcnctcctananaaaaatcanaccctgangcagnactccaaananaaatgaggttgttcttatctnttaaaancccnccncagcccctnnggagntgattggacnaaaaaaaanccttactgnggggnngccccttatcnttaaaaaacaannggggaggnt

SEQ ID NO: 211 - DNA, 1075 bp, Homo Sapiens
  misc_feature (825)..(825): n is a, c, g, or t
  misc_feature (945)..(945): n is a, c, g, or t
  misc_feature (973)..(973): n is a, c, g, or t
  misc_feature (980)..(980): n is a, c, g, or t
  misc_feature (984)..(984): n is a, c, g, or t
  misc_feature (991)..(991): n is a, c, g, or t
  misc_feature (999)..(999): n is a, c, g, or t
  misc_feature (1008)..(1009): n is a, c, g, or t
  misc_feature (1022)..(1022): n is a, c, g, or t
  misc_feature (1033)..(1033): n is a, c, g, or t
  misc_feature (1040)..(1041): n is a, c, g, or t
  misc_feature (1043)..(1043): n is a, c, g, or t
  misc_feature (1050)..(1050): n is a, c, g, or t
  misc_feature (1054)..(1055): n is a, c, g, or t
  misc_feature (1058)..(1058): n is a, c, g, or t
  misc_feature (1067)..(1067): n is a, c, g, or t
  misc_feature (1070)..(1070): n is a, c, g, or t
  misc_feature (1074)..(1074): n is a, c, g, or t
caattagagaaattactatgagaggatcgcatcaccatcaccatcacggatcctatttaggtgacactatagaatcgtcgacccacgcgtccggcccggaagggaaactgcgaggcgaaggtgaccggggaccgagcatttcagatctgctcggtagacctggtgcaccaccaccatgttggctgcaaggctggtgtgtctccggacactaccttctagggttttccacccagctttcaccaaggcctcccctgttgtgaagaattccatcacgaagaatcaatggctgttaacacctagcagggaatatgccaccaaaacaagaattgggatccggcgtgggagaactggccaagaactcaaagaggcagcattggaaccatcgatggaaaaaatatttaaaattgatcagatgggaagatggtttgttgctggaggggctgctgttggtcttggagcattgtgctactatggcttgggactgtctaatgagattggagctattgaaaaggctgtaatttggcctcagtatgtcaaggatagaattcattccacctatatgtacttagcagggagtattggtttaacagctttgtctgccatagcaatcagcagaacgcctgttctcatgaacttcatgatgagaggctcttgggtgacaattggtgtgacctttgcagccatggttggagctggaatgctggtacgatcaataccatatgaccagagcccaggcccaaagcatcttgcttggttgctacattctggtgtgatgggtgcagtggtggctcctctgacaatattagggggtcctcttctcatcanagctgcatggtacacagctggcattgtgggaggcctctccactgtggccatgtgtgcgcccagtgaaaagtttctgaacatgggtgcacccctgggagtgggcctgggtctcgtctttgngtccccattgggatctatgtttcttccncctaccnccgnggctggngcccctcntttactcannggcaatgtacggnggattaattcntttcacnngntccttcngtannaancccaaaaantantcanc

SEQ ID NO: 212 - DNA, 1276 bp, Homo Sapiens
  misc_feature (965)..(965): n is a, c, g, or t
  misc_feature (967)..(967): n is a, c, g, or t
  misc_feature (973)..(973): n is a, c, g, or t
  misc_feature (981)..(981): n is a, c, g, or t
  misc_feature (992)..(992): n is a, c, g, or t
  misc_feature (998)..(999): n is a, c, g, or t
  misc_feature (1002)..(1002): n is a, c, g, or t
  misc_feature (1008)..(1008): n is a, c, g, or t
  misc_feature (1021)..(1021): n is a, c, g, or t
  misc_feature (1023)..(1023): n is a, c, g, or t
  misc_feature (1028)..(1028): n is a, c, g, or t
  misc_feature (1038)..(1038): n is a, c, g, or t
  misc_feature (1041)..(1041): n is a, c, g, or t
  misc_feature (1048)..(1048): n is a, c, g, or t
  misc_feature (1055)..(1055): n is a, c, g, or t
  misc_feature (1066)..(1066): n is a, c, g, or t
  misc_feature (1077)..(1077): n is a, c, g, or t
  misc_feature (1083)..(1083): n is a, c, g, or t
  misc_feature (1086)..(1086): n is a, c, g, or t
  misc_feature (1110)..(1110): n is a, c, g, or t
  misc_feature (1116)..(1116): n is a, c, g, or t
  misc_feature (1119)..(1119): n is a, c, g, or t
  misc_feature (1137)..(1137): n is a, c, g, or t
  misc_feature (1150)..(1150): n is a, c, g, or t
  misc_feature (1154)..(1154): n is a, c, g, or t
  misc_feature (1159)..(1159): n is a, c, g, or t
  misc_feature (1163)..(1163): n is a, c, g, or t
  misc_feature (1168)..(1168): n is a, c, g, or t
  misc_feature (1178)..(1178): n is a, c, g, or t
  misc_feature (1184)..(1184): n is a, c, g, or t
  misc_feature (1187)..(1187): n is a, c, g, or t
  misc_feature (1192)..(1192): n is a, c, g, or t
  misc_feature (1196)..(1196): n is a, c, g, or t
  misc_feature (1215)..(1215): n is a, c, g, or t
  misc_feature (1220)..(1220): n is a, c, g, or t
  misc_feature (1224)..(1224): n is a, c, g, or t
  misc_feature (1231)..(1231): n is a, c, g, or t
  misc_feature (1239)..(1239): n is a, c, g, or t
  misc_feature (1246)..(1246): n is a, c, g, or t
  misc_feature (1256)..(1258): n is a, c, g, or t
  misc_feature (1265)..(1265): n is a, c, g, or t
  misc_feature (1267)..(1267): n is a, c, g, or t
  misc_feature (1270)..(1270): n is a, c, g, or t
  misc_feature (1273)..(1274): n is a, c, g, or t
tagagaaattactatgagaggatcgcatcaccatcaccatcacgggatcctatttaggtgacactatagaatcgtcgacccacgcgtccgcagccttcagccagggcaaatctcttacccttccccagacttgtaatagagagaaaatctatacatgcagtgaatgtgggaaagcctttggcaaacagtcaatcctcaatcgccactggagaattcatacaggagagaagccctatgaatgtcgtgaatgtgggaagacttttagccatggctcatcccttacacgacatctgataagccatagtggagagaaaccttacaaatgtattgaatgtgggaaggcctttagccatgtctcatcacttactaaccatcagagcactcacactggagagaaaccatatgaatgtatgaactgtggaaagtcttttagtcgtgtgtcccatcttattgaacatctaagaattcatactcaagaaaaactctatgagtgtcgtatatgtggaaaggccttcattcataggtcatctctcattcaccatcagaaaatccatactggagagaagccttatgaatgtagagaatgtgggaaagctttctgctgtagctcacaccttactcgacatcaaagaattcacactatggagaaacaatatgaatgcaacaaatgtctgaaagtctttagtagcctctcatttcttgttcagcatcagagtattcatactgaagaaaaaccctttgaatgtcagaaatgcaggaaatccttcaaccagcttgaatcactgaatatgcatttgagaaatcacattagattgaaaccctacgaatgcagtatatgtgggaaagcctttagtcataggtcatccctgcttcaacatcacagaattcatactggagagaaaccttatgaatgtattaaatgggggaagaccttcagctgtagttcaaaccttaccgtacatcananaattcncactgganaaaagccatanaaatgnnatngagtgngggaaagcttttnancaaangctcaatctnacngccctcnaaaatanttaatggaaanaaacccaaaangggggnagnggggaaaagcctttaaactaatgnatcccntanactggggaaaatccttanaaaaaaaaactgnttgnaaccngggntaacngggaaaattnccaaantcnccctnattnacattaaaaaattttaacnggggnaagncttagangggggggnaaaaggnaaaccttttnnnaaaaggngnccnttnntt

SEQ ID NO: 213 - DNA, 1179 bp, Homo Sapiens
  misc_feature (834)..(834): n is a, c, g, or t
  misc_feature (857)..(857): n is a, c, g, or t
  misc_feature (863)..(863): n is a, c, g, or t
  misc_feature (876)..(876): n is a, c, g, or t
  misc_feature (890)..(890): n is a, c, g, or t
  misc_feature (930)..(930): n is a, c, g, or t
  misc_feature (942)..(942): n is a, c, g, or t
  misc_feature (947)..(947): n is a, c, g, or t
  misc_feature (950)..(950): n is a, c, g, or t
  misc_feature (958)..(958): n is a, c, g, or t
  misc_feature (986)..(986): n is a, c, g, or t
  misc_feature (991)..(991): n is a, c, g, or t
  misc_feature (1005)..(1005): n is a, c, g, or t
  misc_feature (1031)..(1031): n is a, c, g, or t
  misc_feature (1036)..(1036): n is a, c, g, or t
  misc_feature (1040)..(1040): n is a, c, g, or t
  misc_feature (1045)..(1045): n is a, c, g, or t
  misc_feature (1054)..(1054): n is a, c, g, or t
  misc_feature (1059)..(1059): n is a, c, g, or t
  misc_feature (1062)..(1064): n is a, c, g, or t
  misc_feature (1072)..(1073): n is a, c, g, or t
  misc_feature (1083)..(1083): n is a, c, g, or t
  misc_feature (1088)..(1088): n is a, c, g, or t
  misc_feature (1099)..(1099): n is a, c, g, or t
  misc_feature (1103)..(1103): n is a, c, g, or t
  misc_feature (1111)..(1111): n is a, c, g, or t
  misc_feature (1124)..(1125): n is a, c, g, or t
  misc_feature (1133)..(1133): n is a, c, g, or t
  misc_feature (1136)..(1137): n is a, c, g, or t
  misc_feature (1139)..(1139): n is a, c, g, or t
  misc_feature (1154)..(1154): n is a, c, g, or t
  misc_feature (1156)..(1156): n is a, c, g, or t
  misc_feature (1174)..(1174): n is a, c, g, or t
tagagaaattactatgagaggatcgcatcaccatcaccatcacggatcctatttaggtgacactatagaatcgtcgacccacgcgtccgagatgatccggcgcaggagaccaacgcctgccatgctgttccggctctcagagcactcctcaccagaggaggaagcctccccccaccagagagcctcaggagaggggcaccatctcaagtcgaagagacccaacccctgtgcctacacaccaccttcgctgaaagctgtgcagcgcattgctgagtctcacctgcagtctatcagcaatttgaatgagaaccaggcctcagaggaggaggatgagctgggagcgcccaccccctctggatgagtccgagagagatggaggctctgaggaccaagtggaagacccagcactaagtgagcctggggaggaacctcagcgcccttccccctctgagcctggcacataggcacccagcctgcatctcccaggaggaagtggaggggacatcgctgttccccagaaacccactctatcctcaccctgttttgtgctcttcccctcgcctgctagggctgcggcttctgacttctagaagactaaggctggtctgtgtttgcttgtttgcccacctttggctgatacccagagaacctgggcacttgctgcctgatgcccacccctgccagtcattcctccattcacccagcgggaggtgggatgtgagacagcccacattggaaaatccagaaaaccgggaacagggatttgcccttcacaattctactccccagatcctctcccctggacacaggagacccacagggcaggaccctaanatctggggaaaggaggtcctganaacctngaggtacccttanatccttttctaccnactttcctatggaggattccaagtcaccacttttctcacnggcttctaccanggtcnagnactaaggngttttttctccatagcctcaacattttngggantcttccctttatcncccttgctcctcctggggtgcctggnaaaanggantggcnaaaaacctnttttntgnnnttttgggnntttgaaggcnagaantgccccctaantttntgtccccngggggggcaaaanngggggggnccnngnttttctttgtccccnangggtttggcccttttccnttttt

SEQ ID NO: 214 - DNA, 1017 bp, Homo Sapiens
  misc_feature (3)..(3): n is a, c, g, or t
  misc_feature (574)..(574): n is a, c, g, or t
  misc_feature (724)..(724): n is a, c, g, or t
  misc_feature (762)..(762): n is a, c, g, or t
  misc_feature (787)..(787): n is a, c, g, or t
  misc_feature (815)..(815): n is a, c, g, or t
  misc_feature (830)..(830): n is a, c, g, or t
  misc_feature (844)..(844): n is a, c, g, or t
  misc_feature (867)..(868): n is a, c, g, or t
  misc_feature (872)..(873): n is a, c, g, or t
  misc_feature (875)..(875): n is a, c, g, or t
  misc_feature (881)..(881): n is a, c, g, or t
  misc_feature (887)..(887): n is a, c, g, or t
  misc_feature (889)..(889): n is a, c, g, or t
  misc_feature (891)..(891): n is a, c, g, or t
  misc_feature (893)..(893): n is a, c, g, or t
  misc_feature (902)..(902): n is a, c, g, or t
  misc_feature (920)..(920): n is a, c, g, or t
  misc_feature (926)..(926): n is a, c, g, or t
  misc_feature (929)..(929): n is a, c, g, or t
  misc_feature (934)..(934): n is a, c, g, or t
  misc_feature (937)..(937): n is a, c, g, or t
  misc_feature (946)..(947): n is a, c, g, or t
  misc_feature (952)..(952): n is a, c, g, or t
  misc_feature (966)..(966): n is a, c, g, or t
  misc_feature (968)..(969): n is a, c, g, or t
  misc_feature (974)..(974): n is a, c, g, or t
  misc_feature (996)..(996): n is a, c, g, or t
  misc_feature (1005)..(1005): n is a, c, g, or t
  misc_feature (1008)..(1008): n is a, c, g, or t
gantagagaaattactatgagaggatcgcatcaccatcaccatcacggatcctatttaggtgacactatagaatcgtcgacccacgcgtccggcaaacaaggcccgatcgatgttttcctgtgccctgaggagaccgtaggtgggatcagccctgggaagaccccatcccaggaggtcacttctgaggaggagaacagggccactgactctgccaccatagtgtcaccaccaccatcatctcccccctcatccctcaccacagatcccagccagtctctactcagcctggagcaagaaccgctgttgtcccggatgggcagcctgcgggctcccgtggacgaggaccgcctgtccccgctggtggcggccgactcgctcctggagcatgtgcgggaggacttctccggcctcctccctgaggagttcatcagcctttccccaccccacgaggccctcgactaccacttcggcctcgaggagggcgagggcatcagagacctcttcgactgtgactttggggacctcacccccctggatttctgacagggcttggagggaccagggtttccaganatgctcaccttgtctctgcagccctggagccccctgtccctggccgtcctcccagcctgtttggaaacatttaatttatacccctctcctctgtctccagaagcttctagctctggggtctggctaccgctaggaggctgagcaagccangaagggaaggagtctgtgtggtgtgtatgtgcatgcancctacacccaacgtgtgtaccgggngtgaatgtgtgtgagcatgtgtgtgtgnattgtaccggggaantgaaaggtgaacantaccccctctgtgtgtgcactgnnaaanncnccccantgtgtncncnanggtggtgangcatgaaaatccatggtngcccgnggnggggnctnctaactgcnntttcngcccctttttgttntnnggggntccaacaaaggcccaagggaantgcctgctnccnaaaaactgg

SEQ ID NO: 215 - DNA, 1177 bp, Homo Sapiens
  misc_feature (2)..(2): n is a, c, g, or t
  misc_feature (5)..(5): n is a, c, g, or t
  misc_feature (775)..(775): n is a, c, g, or t
  misc_feature (872)..(872): n is a, c, g, or t
  misc_feature (899)..(899): n is a, c, g, or t
  misc_feature (913)..(913): n is a, c, g, or t
  misc_feature (938)..(938): n is a, c, g, or t
  misc_feature (949)..(949): n is a, c, g, or t
  misc_feature (954)..(954): n is a, c, g, or t
  misc_feature (957)..(957): n is a, c, g, or t
  misc_feature (963)..(963): n is a, c, g, or t
  misc_feature (989)..(989): n is a, c, g, or t
  misc_feature (991)..(991): n is a, c, g, or t
  misc_feature (1002)..(1002): n is a, c, g, or t
  misc_feature (1006)..(1006): n is a, c, g, or t
  misc_feature (1021)..(1021): n is a, c, g, or t
  misc_feature (1039)..(1039): n is a, c, g, or t
  misc_feature (1049)..(1049): n is a, c, g, or t
  misc_feature (1051)..(1051): n is a, c, g, or t
  misc_feature (1055)..(1055): n is a, c, g, or t
  misc_feature (1063)..(1063): n is a, c, g, or t
  misc_feature (1077)..(1077): n is a, c, g, or t
  misc_feature (1082)..(1083): n is a, c, g, or t
  misc_feature (1093)..(1093): n is a, c, g, or t
  misc_feature (1102)..(1102): n is a, c, g, or t
  misc_feature (1106)..(1106): n is a, c, g, or t
  misc_feature (1117)..(1117): n is a, c, g, or t
  misc_feature (1124)..(1124): n is a, c, g, or t
  misc_feature (1132)..(1133): n is a, c, g, or t
  misc_feature (1141)..(1142): n is a, c, g, or t
  misc_feature (1149)..(1149): n is a, c, g, or t
  misc_feature (1161)..(1161): n is a, c, g, or t
  misc_feature (1163)..(1163): n is a, c, g, or t
  misc_feature (1173)..(1173): n is a, c, g, or t
  misc_feature (1176)..(1176): n is a, c, g, or t
gnatnagagaaaattactatgagaggatcgcatcaccatcaccatcacggatcctatttaggtgacactatagaatcgtcgacccacgcgtccgcgcctgtgggagccgtggagggcactttcccagtccccgaggcggatccggtgttgcatccttggagagagctgagagctggagaacctgctaaggccatcaaacctattgatcggaagtcagtccatcagatttgctctgggccggtagtactgagtctaagcactgcggtgaagaagatggtagaaaacagtctggatgctggtgccactaatattgatctaaagcttaaggactatggaatggatctcattgaagtttcaggcaatggatgtggggtagaagaagaaaacttcgaaggcttaatgatgtcaccatttctacctgccacgtatcggcgaaggttgggactcgactggtgtttgatcacgatgggaaaatcatccagaaaaccccctacccccaccccagagggaccacagtcagcgtgaagcagttattttctacgctacctgtgcgccataaggaatttcaaaggaatattaagaaggtacagtaaattaatcctggttttcaagagtattggttaatgcacatgagcaaaagatttactaaagatgtttattcttcagttgattctcttcccataatttattgagaaatgctttatttgcatttctcattaaagacttaacttcaggatgatttacttttttctttttatcacataatgtttattangactgggaaacatggtgagactctgtctctatgaaaaattaaaaaaaaggattgactgggcatggtggcatgcacctgtagttccagctacttgggnaggctgaagtgggaaggatcgcctganctcaggaacttganactgcagtgagctatgattgcgtcnctacacttcanactgnganacaaantaaaaaccctgtctggaaaaaatatntntacctataaanaccnttttttttaattttnaattttaacccttttttngaaaagggantncccnctttggcncccctggctgcaangcaannggccccgatntccatttcnttgnaaccctccccntgccaanttcggggnnattccccnngctttcncccttttgaaananctggccattnaang

SEQ ID NO: 216 - DNA, 798 bp, Homo Sapiens
  misc_feature (701)..(701): n is a, c, g, or t
  misc_feature (727)..(727): n is a, c, g, or t
  misc_feature (768)..(768): n is a, c, g, or t
  misc_feature (771)..(772): n is a, c, g, or t
  misc_feature (775)..(775): n is a, c, g, or t
  misc_feature (779)..(779): n is a, c, g, or t
  misc_feature (781)..(781): n is a, c, g, or t
  misc_feature (786)..(786): n is a, c, g, or t
  misc_feature (788)..(788): n is a, c, g, or t
  misc_feature (790)..(790): n is a, c, g, or t
  misc_feature (792)..(792): n is a, c, g, or t
  misc_feature (794)..(795): n is a, c, g, or t
  misc_feature (797)..(798): n is a, c, g, or t
tagagagaattactatgagaggatcgcatcaccatcaccatcacggatcctatttaggtgacactatagaatcgtcgacccacgcgtccgcccacgcgtccgcgctggcccatccctacttcgagtccctgcacgacacggaagatgagccccaggtccagaagtatgatgactcctttgacgacgttgaccgcacactggatgaatggaagcgtgttacttacaaagaggtgctcagcttcaagcctccccggcagctgggggccagggtctccaaggagacgcctctgtgaagatctctgggctccggggtggcagtgaggaccaccttcaccttccacctgagaggggactctcgttgccaccttgaccttggctggggcttgcatcccaaggcatccatcagagcagacgcccgggttccatggaccctcctccccacggccatgcctctggacaagacctctggccgacctggggatggcctctgatccctggagcagtggcccacttgcccggtgctctcagaaacctcagagctggtggggctccagatcaggccttggcctctgagccctgcctgctctgggccatgcagaggaaggacagagggtgggcgcagggcaccaactcagggacatcccctctcctgggcgacgtcagtggaccttcctgcacccccagcctggaatgtaaatcanctgtgtggtgcccgcgtggctggaangaaatagacccttttgtagctccctgaaaaaaaaaaaaaanaannaanaaanantaaananananannann

SEQ ID NO: 217 - DNA, 1179 bp, Homo Sapiens
  misc_feature (3)..(3): n is a, c, g, or t
  misc_feature (864)..(864): n is a, c, g, or t
  misc_feature (926)..(926): n is a, c, g, or t
  misc_feature (964)..(964): n is a, c, g, or t
  misc_feature (967)..(967): n is a, c, g, or t
  misc_feature (974)..(974): n is a, c, g, or t
  misc_feature (987)..(987): n is a, c, g, or t
  misc_feature (989)..(989): n is a, c, g, or t
  misc_feature (992)..(992): n is a, c, g, or t
  misc_feature (999)..(999): n is a, c, g, or t
  misc_feature (1007)..(1007): n is a, c, g, or t
  misc_feature (1014)..(1014): n is a, c, g, or t
  misc_feature (1016)..(1016): n is a, c, g, or t
  misc_feature (1032)..(1032): n is a, c, g, or t
  misc_feature (1044)..(1044): n is a, c, g, or t
  misc_feature (1058)..(1058): n is a, c, g, or t
  misc_feature (1061)..(1061): n is a, c, g, or t
  misc_feature (1078)..(1078): n is a, c, g, or t
  misc_feature (1091)..(1091): n is a, c, g, or t
  misc_feature (1094)..(1094): n is a, c, g, or t
  misc_feature (1096)..(1096): n is a, c, g, or t
  misc_feature (1110)..(1110): n is a, c, g, or t
  misc_feature (1115)..(1115): n is a, c, g, or t
  misc_feature (1125)..(1126): n is a, c, g, or t
  misc_feature (1129)..(1129): n is a, c, g, or t
  misc_feature (1136)..(1136): n is a, c, g, or t
  misc_feature (1138)..(1138): n is a, c, g, or t
  misc_feature (1148)..(1148): n is a, c, g, or t
  misc_feature (1154)..(1154): n is a, c, g, or t
  misc_feature (1178)..(1178): n is a, c, g, or t
gantagagagattactatgagaggatcgcatcaccatcaccatcacggatcctatttaggtgacactatagaatcgtcgacccacgcgtccgaatatgtaaaaactatgttacggaatggttatgctcctgttgaatttttcctcgaagggacaagaagccgctctgccaagacattgactcctaaatttggtcttctgaatattgtgatggagccattttttaaaagagaagtttttgatacctaccttgtcccaattagtatcagttatgataagatcttggaagaaactctttatgtgtatgagcttctaggggttcctaaaccaaaagaatctacaactgggttgctgaaagccagaaagattctctctgaaaattttggaagcatccatgtgtactttggagatcctgtgtcacttcgatctttggcagctgggaggatgagtcggagctcatataacttggttccaagatacattcctcagaaacagtctgaggacatgcatgcctttgtcactgaagttgcctacaaaatggagcttctgcaaattgaaaacatggttttgagcccctggaccctaatagttgctgttctgcttcagaaccggccatccatggactttgatgctctggtggaaaagactttatggctaaaaggcttaacccaggcatttggagggtttctcatttggcctgataataaacctgctgaagaagttgtcccggccagcattcttctgcattccaacattgccagccttgtcaaagaccaggtgattctgaaagtggactccggagactcggaagtggtcgatgggcttatgctccagcacatcactctcctcatgtgctcagcttatanggaaccagctgctcaacatttttgtgcgcccatccttagtagcagtagcattgcaaatgacnccagggttcaggaaagaggatgtctacagttgctttcnctncctacgngatgtttttgcananganttcctcntccttccnggaaacncnctaaaggactttgaanaaggctgttacntgctttgtaaaagnganccctacaagtgactacnaaagacctcctanttncnaaaaaaggaaaacngggtnaaaattttannagnacccttnancctttggggnaagctnccaaaaatttgcagaacctttggng

SEQ ID NO: 218 - DNA, 1081 bp, Homo Sapiens
  misc_feature (867)..(867): n is a, c, g, or t
  misc_feature (919)..(919): n is a, c, g, or t
  misc_feature (935)..(935): n is a, c, g, or t
  misc_feature (953)..(953): n is a, c, g, or t
  misc_feature (977)..(977): n is a, c, g, or t
  misc_feature (979)..(979): n is a, c, g, or t
  misc_feature (990)..(990): n is a, c, g, or t
  misc_feature (992)..(992): n is a, c, g, or t
  misc_feature (995)..(995): n is a, c, g, or t
  misc_feature (1016)..(1017): n is a, c, g, or t
  misc_feature (1019)..(1020): n is a, c, g, or t
  misc_feature (1023)..(1025): n is a, c, g, or t
  misc_feature (1041)..(1041): n is a, c, g, or t
  misc_feature (1043)..(1043): n is a, c, g, or t
  misc_feature (1045)..(1045): n is a, c, g, or t
  misc_feature (1064)..(1065): n is a, c, g, or t
  misc_feature (1067)..(1067): n is a, c, g, or t
  misc_feature (1075)..(1075): n is a, c, g, or t
  misc_feature (1079)..(1079): n is a, c, g, or t
attgagaaattactatgagaggatcgcatcaccatcaccatcacggatcctatttaggtgacacttatagaatcgtcgacccacgcgtccgcccacgcgtccgcggacgcgtgggctccacggccgaagaatgtgatctttgaagatgaggagaaatccaagatgctggcccgcctgctgaagagctcccatcccgaagacctccgcgcagccaataagctcatcaaagagatggtgcaggaggaccagaagcggatggagaagatctcgaagagggtgaatgccatcgaggaggtgaacaacaatgtgaaactgctcacggagatggtgatgagccacagccagggcggcgcagcagctggcagcagcgaggacctcatgaaggaactgtaccagcgctgtgagcggatgcggcccacgctcttccgactggcgagtgacacagaggacaatgatgaggccttagcggagatcctgcaggccaatgacaacctcacccaggtgatcaacctgtataagcagctggtgcggggtgaggaggtcaacggtgatgccacagccggctccatccctgggagcacctcggccctgctggatctctcaggcctggatctcccgcctgcgggcaccacctacccagctatgcccacccgccctggcgagcaggccagccctgagcagcccagtgcctcagtttccctgcttgacgacgagctcatgtctctgggcctcagtgaccccacacccccttcaggcccaagcctggatggtaccggatggaacagcttccagtcgtcggatgccactgagcccccagcccctgctctggcccaggcccccagtatggaaagccgacccccagcgcanacatccctgccagcaagcagcggtctggacgacctaaacctcctggggaaancctcctgcagcagtcnctgcccccggaatcccancaagtgcggtgggaaaacacagcnanccccgggtcanantcnggacctgcaaaataaaaacannanntgnnntccccagttcagggcncnancttttccaaacgtgtcccnnancccccagnctcnca

SEQ ID NO: 219 - DNA, 1179 bp, Homo Sapiens
  misc_feature (930)..(930): n is a, c, g, or t
  misc_feature (989)..(989): n is a, c, g, or t
  misc_feature (997)..(997): n is a, c, g, or t
  misc_feature (1002)..(1002): n is a, c, g, or t
  misc_feature (1005)..(1005): n is a, c, g, or t
  misc_feature (1022)..(1022): n is a, c, g, or t
  misc_feature (1032)..(1032): n is a, c, g, or t
  misc_feature (1048)..(1048): n is a, c, g, or t
  misc_feature (1055)..(1055): n is a, c, g, or t
  misc_feature (1061)..(1061): n is a, c, g, or t
  misc_feature (1079)..(1079): n is a, c, g, or t
  misc_feature (1082)..(1082): n is a, c, g, or t
  misc_feature (1084)..(1084): n is a, c, g, or t
  misc_feature (1103)..(1103): n is a, c, g, or t
  misc_feature (1107)..(1107): n is a, c, g, or t
  misc_feature (1113)..(1113): n is a, c, g, or t
  misc_feature (1115)..(1115): n is a, c, g, or t
  misc_feature (1131)..(1131): n is a, c, g, or t
  misc_feature (1136)..(1136): n is a, c, g, or t
  misc_feature (1147)..(1147): n is a, c, g, or t
  misc_feature (1155)..(1155): n is a, c, g, or t
  misc_feature (1158)..(1158): n is a, c, g, or t
  misc_feature (1167)..(1167): n is a, c, g, or t
gagaaattactatgagaggatcgcatcaccatcaccatcacggatcctatttaggtgacactatagaatcgtcgacccacgcgtccggctatgttctgctggagcattctgtgaagaaggcagtacattttgggttaccgtacctcgcctccctgggaatacagtcccttgttcaacagagagcttttgctgggaagacggcaaacaagctgatggatgccctaaaggactccgacctcctgcactggaaacacagcctgtcagagctcatcgatatcagcatcgcacagaaaacggccatctggaggctgtatggccgcagcaccatggcactgcaacaggcccagatgttgctgagcatgaacagcctggaggcggtgaatgcgggcgtgcagcagaacaacacagagtcctttgctgtcgcactctgccacctcgcagagctacacgcggagcagggctgttttgctgcagcttctgaagtgttaaagcacttgaaggaacgatttccgcctaatagtcagcacgcccagttatggatgctatgtgatcaaaaaatacagtttgacagagcaatgaatgatggcaaatatcatttggctgattcacttgttacaggaatcacagctctcaatagcatagagggtgtttataggaaagcggttgtattacaagctcagaaccaaatgtcagaggcacataagcttttacaaaaattgttggttcattgtcagaaactgaagaacacagaaatggtgatcagtgtcctactgtccgtggcagagctgtactggcgatcttcctcccctaccatcgcgctgcccatgctcctgcaggctctggccctctccaaggagtaccggttacagtacttggcctctgaaacagtgctgaacttggcttttgcgcagctcattcttggaatcccanaacaggccttaagtcttctcccatggccatcgagcccatcttggctgacggggctatcntggacaangtcgngcnatgttcttaatggccantgccaggggnttcagcagcttcctanatcaccnaaaaancaaaactctggagctgcntcnanacctcatgaaccaaaactntttncaaagntnactgcaaaagccatcnggaantctttattccngccaattnacntacctgggnaaaccagaaaaa

SEQ ID NO: 220 - DNA, 967 bp, Homo Sapiens
  misc_feature (829)..(829): n is a, c, g, or t
  misc_feature (869)..(869): n is a, c, g, or t
  misc_feature (890)..(890): n is a, c, g, or t
  misc_feature (894)..(894): n is a, c, g, or t
  misc_feature (897)..(897): n is a, c, g, or t
  misc_feature (899)..(899): n is a, c, g, or t
  misc_feature (908)..(908): n is a, c, g, or t
  misc_feature (913)..(913): n is a, c, g, or t
  misc_feature (947)..(967): n is a, c, g, or t
ttagagaaattactatgagaggatcgcatcaccatcaccatcacggatcctatttaggtgacactatagaatcgtcgacccacgcgtccggtcgccgccggggcgactcggagtcagaggaagatgagcaggactcagaggaggttcgattaaaactggaagagaccagagaagtacagaacttgaggaagaggcccaacggggtgagtgctgtggccttgctggtgggagagaaggtacaagaggagaccactctagtggatgatccctttcagatgaagacaggtggtatggtggatatgaagaaactgaaggaaaggggcaaagataagatcagtgaggaggaggacctgcacctggggacatcgttttctgcagaaaccaaccgaagggatgaggatgcagacatgatgaagtacattgagacagagctaaagaagaggaaagggatcgtggaacatgaggaacagaaagttaagccaaagaatgcagaggactgtctttatgaacttccagaaaacatccgtgtttcctcagcaaagaagaccgaggagatgctttccaaccagatgctgagtggcattcctgaggtggacctgggcatcgagtatgtttgagacccctaggcagaagacacagtgctttccagttaaaagttatgggggacaggccaggcacggtggctcatgcctgtaatcctagcactttgggaggctgaggcgggtggatcacgaggtcaggagttcaagaccagcccggccaagatggtcgaaccccgtctctactaaaaatacaaaaattagctgggcatggtggcaggcacctgtantccagctacttggggaggctgaggcaggaaattgcttganccctgaaggtggaggttgcantgangcnanatcatgccnctgcnctccagtctggcgacaaaccagactccctctccnnnnnnnnnnnnnnnnnnnnn

SEQ ID NO: 221 - DNA, 1322 bp, Homo Sapiens
  misc_feature (835)..(835): n is a, c, g, or t
  misc_feature (866)..(866): n is a, c, g, or t
  misc_feature (947)..(947): n is a, c, g, or t
  misc_feature (952)..(952): n is a, c, g, or t
  misc_feature (954)..(954): n is a, c, g, or t
  misc_feature (959)..(959): n is a, c, g, or t
  misc_feature (963)..(963): n is a, c, g, or t
  misc_feature (965)..(965): n is a, c, g, or t
  misc_feature (1016)..(1016): n is a, c, g, or t
  misc_feature (1018)..(1018): n is a, c, g, or t
  misc_feature (1028)..(1028): n is a, c, g, or t
  misc_feature (1035)..(1035): n is a, c, g, or t
  misc_feature (1041)..(1041): n is a, c, g, or t
  misc_feature (1070)..(1070): n is a, c, g, or t
  misc_feature (1092)..(1092): n is a, c, g, or t
  misc_feature (1112)..(1112): n is a, c, g, or t
  misc_feature (1114)..(1114): n is a, c, g, or t
  misc_feature (1127)..(1128): n is a, c, g, or t
  misc_feature (1130)..(1130): n is a, c, g, or t
  misc_feature (1150)..(1150): n is a, c, g, or t
  misc_feature (1168)..(1168): n is a, c, g, or t
  misc_feature (1178)..(1178): n is a, c, g, or t
  misc_feature (1184)..(1184): n is a, c, g, or t
  misc_feature (1193)..(1193): n is a, c, g, or t
  misc_feature (1198)..(1198): n is a, c, g, or t
  misc_feature (1201)..(1201): n is a, c, g, or t
  misc_feature (1213)..(1213): n is a, c, g, or t
  misc_feature (1221)..(1222): n is a, c, g, or t
  misc_feature (1224)..(1224): n is a, c, g, or t
  misc_feature (1249)..(1249): n is a, c, g, or t
  misc_feature (1253)..(1255): n is a, c, g, or t
  misc_feature (1265)..(1265): n is a, c, g, or t
  misc_feature (1267)..(1267): n is a, c, g, or t
  misc_feature (1269)..(1269): n is a, c, g, or t
  misc_feature (1271)..(1271): n is a, c, g, or t
  misc_feature (1273)..(1274): n is a, c, g, or t
  misc_feature (1289)..(1289): n is a, c, g, or t
  misc_feature (1295)..(1295): n is a, c, g, or t
  misc_feature (1297)..(1297): n is a, c, g, or t
  misc_feature (1299)..(1299): n is a, c, g, or t
  misc_feature (1317)..(1317): n is a, c, g, or t
tagagaaattactatgagaggatcgcatcaccatcaccatcacggatcctatttaggtgacactatagaatcgtcgacccacgcgtccgcccacgcgtccgtggtgctggaacagttcctgagcgcgctgcccgccgacacgcaggcctgggtgtgcagccggcagccgcagagcggggaggaggcggtggccctgctggaggagctctgggggccagcagcctcccccgatgggtcgtcagcaacgagggtgcctcaggatgtgacgcagggccctggggccacaggtggaaaggaggacagtgggatgattcccttaggcaccgcccctggggctgaggggccggcgcctggggactcccaggctgtgcgcccctacaagcaggagcccagcagccccccgctggcgcctggcctgcccgccttcctagcggccccgggcaccacgtcctgccccgagtgcggcaaaacgtccctgaaaccagctcacctgctgcgccaccggcagagccactcgggcgagaagccgcacgcctgccctgagtgcgggaaggcctttcggcgcaaggagcacctgcggcgccaccgcgacacgcaccccggcagccccggcagccccgggcccgcgctgcgccctctgcccgcccgtgagaagccccacgcgtgctgcgagtgtggcaagaccttctactggcgcgagcacctggtgcgccaccgcaagacgcactcgggagcgcggccctttgcctgctgggagtgtggcaagggcttcgggcgccgcgagcacgtgctgcgccaccagcgcatccacggccgggcagcggccagcgcgcanggggcggtagctccgggcccggatggtggangcccctttccgccctggccttgggttagccgcctcccggccagcgccatctccgcccttggtgctgcccccgggcggtacntgctntntccancgcnanttggcctcttcctctcttctttcctccaatcgtcttcttcaacttgggctncnttgtttgaanttccaangccttnctattcttttcaattctttttccccaaantttaattttttttttaaggttnacttaacccccccttttccntnattttcggctttnncntggtgaaagggcctctcccnaaggttcctctttccccntttttttttntggggncaacctccnttccnccnattttttttccngccttttnncnaaaaaaaaataaaattggaacttanggannnaaaaaatttngncnancnncccttttaaaaaaanaaaaangntngttttccaaaatttcccnaaatg

SEQ ID NO: 222 - DNA, 870 bp, Homo Sapiens
  misc_feature (802)..(802): n is a, c, g, or t
  misc_feature (870)..(870): n is a, c, g, or t
gagagattactatgagaggatcgcatcaccatcaccatcacggatcctatttaggtgacactatagaatcgtcgacccacgcgtccggctaccagctccccgctgccctgcgctcggcgcgctggcatccggcccgggggaaagcggaccagcccttctgcaggtctgcggggccaagtgtcccggcggcgcacctcgtggcgagaatcgggagaaggaggagactacaaggataggcccaggagtaatggagtccaaagagaaacgagcagtaaacagtctcagcatggaaaatgccaaccaagaaaatgaagaaaaggagcaagttgctaataaaggggagcccttggccctccctttggatgctggtgaatactgtgtgcctagaggaaatcgtaggcggttccgcgttaggcagcccatcctgcagtatagatgggatatgatgcataggcttggagaaccacaggcaaggatgagagaagagaatatggaaaggattggggaggaggtgagacagctgatggaaaagctgagggaaaagcagttgagtcatagtctgcgggcagtcagcactgacccccctcaccatgaccatcatgatgagttttgccttatgccctgaatcctgatggtttccctaaagttattacggaaacagacccctgctttcgaatttacatgttcatgatgtgcccttgttgtaaacctttacctgtcacttgtttacgtgggtctcctattaccagcttctaattgaatattgtgtttttgaaccagtctgtaagatttttgttagcanaagaattttacctattgcatggaaagatgctcattatagtgaagttaataaagcacctttaaaaagcn

SEQ ID NO: 223 - DNA, 1199 bp, Homo Sapiens
  misc_feature (812)..(812): n is a, c, g, or t
  misc_feature (835)..(835): n is a, c, g, or t
  misc_feature (876)..(876): n is a, c, g, or t
  misc_feature (900)..(900): n is a, c, g, or t
  misc_feature (908)..(908): n is a, c, g, or t
  misc_feature (916)..(916): n is a, c, g, or t
  misc_feature (945)..(945): n is a, c, g, or t
  misc_feature (972)..(972): n is a, c, g, or t
  misc_feature (983)..(983): n is a, c, g, or t
  misc_feature (987)..(987): n is a, c, g, or t
  misc_feature (1001)..(1001): n is a, c, g, or t
  misc_feature (1004)..(1004): n is a, c, g, or t
  misc_feature (1021)..(1021): n is a, c, g, or t
  misc_feature (1033)..(1033): n is a, c, g, or t
  misc_feature (1060)..(1061): n is a, c, g, or t
  misc_feature (1066)..(1066): n is a, c, g, or t
  misc_feature (1069)..(1069): n is a, c, g, or t
  misc_feature (1071)..(1071): n is a, c, g, or t
  misc_feature (1077)..(1077): n is a, c, g, or t
  misc_feature (1081)..(1081): n is a, c, g, or t
  misc_feature (1091)..(1091): n is a, c, g, or t
  misc_feature (1105)..(1105): n is a, c, g, or t
  misc_feature (1108)..(1108): n is a, c, g, or t
  misc_feature (1111)..(1111): n is a, c, g, or t
  misc_feature (1131)..(1131): n is a, c, g, or t
  misc_feature (1136)..(1136): n is a, c, g, or t
  misc_feature (1138)..(1138): n is a, c, g, or t
  misc_feature (1153)..(1153): n is a, c, g, or t
  misc_feature (1158)..(1158): n is a, c, g, or t
  misc_feature (1164)..(1164): n is a, c, g, or t
  misc_feature (1166)..(1166): n is a, c, g, or t
  misc_feature (1169)..(1169): n is a, c, g, or t
  misc_feature (1175)..(1175): n is a, c, g, or t
  misc_feature (1188)..(1188): n is a, c, g, or t
  misc_feature (1193)..(1193): n is a, c, g, or t
agaaattactatgagaggatcgcatcaccatcaccatcacggatcctatttaggtgacactatagaatcgtcgacccacgcgtccgggactccggcccagaagccggctcgcagcgcctgctgttttctcacgacctggtgtcgggccgttaccgtggctccgtgcacttcgggctggtgcgcctcatccacggcgaggactcggactcggagggcgaggaggagggccgcgggagctcggggtgctccgaggccgggggcgcgggccacgaggagggccgggccagccccctgcgccgcggctacgtgcgcgtccagtggtacccggagggcgtcaagcagcatgtgaaggagaccaagctgaaactagaggaccgttctgtggtgccccgagatgtggtccggcacatgcgatccaccgacagtcagtgtggcacggtgatcgacgtcaacatcgactgtgccgtcaagctcatcggcaccaactgcatcatctatcccgtcaacagcaaggacctgcagcacatctggcccttcatgtatggggactacattgcctatgactgctggctggggaaggtctacgacttgaagaaccagatcatcctgaagctatccaacggcgccaggtgctccatgaacacggaagatggcgccaagctctacgacgtctgcccgcacgtcagcgactcgggtctcttcttcgatgattcctatggcttctacccaggccaggtgctcattggccctgccaagatcttctccagcgtccagtggctgtcaggtgtcaagcccgtgctcagcaccaagancaagttccgagtggtggtggaanaagtgcaggttgtaaagttgaaagttacatggattaccaanagtttctgtccagggggcacgganagcgtcanccccccanccttttgtcatcacccaagaaaaacttangcagggtgaaacgtctcgaatgctttnaccatgctcancggncaacttggggaacnctntctgtatttcttcccanccaaaggtgaancccctgtttaaaaaaacaaggttttgnngaatnatntnatgctncccnaaaaaccaantgttcccgggaacnttnccntggaaaaacccaaaaaaaanggggnantccaaaccaaaaacnaaacngaaatntnccncccctnaaaaaaaaccccnaaggntttccc

SEQ ID NO: 224 - DNA, 1177 bp, Homo Sapiens
  misc_feature (866)..(866): n is a, c, g, or t
  misc_feature (992)..(992): n is a, c, g, or t
  misc_feature (994)..(994): n is a, c, g, or t
  misc_feature (1011)..(1011): n is a, c, g, or t
  misc_feature (1016)..(1016): n is a, c, g, or t
  misc_feature (1020)..(1020): n is a, c, g, or t
  misc_feature (1026)..(1027): n is a, c, g, or t
  misc_feature (1029)..(1029): n is a, c, g, or t
  misc_feature (1048)..(1048): n is a, c, g, or t
  misc_feature (1050)..(1050): n is a, c, g, or t
  misc_feature (1057)..(1057): n is a, c, g, or t
  misc_feature (1068)..(1068): n is a, c, g, or t
  misc_feature (1075)..(1075): n is a, c, g, or t
  misc_feature (1077)..(1077): n is a, c, g, or t
  misc_feature (1081)..(1081): n is a, c, g, or t
  misc_feature (1087)..(1087): n is a, c, g, or t
  misc_feature (1095)..(1095): n is a, c, g, or t
  misc_feature (1097)..(1097): n is a, c, g, or t
  misc_feature (1102)..(1102): n is a, c, g, or t
  misc_feature (1110)..(1110): n is a, c, g, or t
  misc_feature (1127)..(1128): n is a, c, g, or t
  misc_feature (1131)..(1131): n is a, c, g, or t
  misc_feature (1133)..(1133): n is a, c, g, or t
  misc_feature (1152)..(1152): n is a, c, g, or t
  misc_feature (1156)..(1156): n is a, c, g, or t
  misc_feature (1170)..(1170): n is a, c, g, or t
  misc_feature (1176)..(1176): n is a, c, g, or t
tagagaaattactatgagaggatcgcatcaccatcaccatcacggatcctatttaggtgacactatagaatcgtcgacccacgcgtccgctgacatcatccagggcaagctggaccagcgaaaccagctgctggaagtggatttctgcattggccgtgacatccgaaagaaggatatcaataatattgtcaagaccctgcatgaatggtgtgatggctgtgaagcagttctactgggcatcgagcagcaagttctgagagccaaccagtacaaagagaaccacaaccgaactcagcagcaggtagaagcagaggttaccaacatcaagaagacactcaaagccaccgcatcctcctcggctcaggagatggagcagcagctggctgaacgggagtgtccccctcacgctgagcagaggcagcccaccaagaagatgtccaaagtgaaaggtctggtctccagccgccactagggccggctggggcagctggcactcaccaggcctgggtcaggtggggaggggacaccaagggcccatttcctcccctctctacctgcagtgagttccagacctgcccgtcccctcaccagcgcctccccaccctgttggtactgttccagaaaaactgttactccccctcacccactccctccttccccagttgttcccttcagactcaggggctccaccaatgccatcccaaaacagggtcagacactgcccagcttccctccaggaggttcttgtctctgtgtaagggcttgtctccctcccagtttttcttttgctccacgtcattttgtcaggctggttataagccggaggcagctttaaccagcccccagggatgattgtttgaaaggangccccttccccttgtgaaggagggggcactcctctccagcccctggtaccacagtcctcacgaatggtgcagtgatttctagccaggcgtcaagatgcgctgcttttcctctcctgcctcatcccntngttggcagctccatttnagccntggnaagganntnatttttgggcttttttttntnaaacccncgggttttttnccccttnancccncctccnatttccantnttttnaaagggcnggggtgaaaaaccctgnnatntnaaaaaaaaaaaaagggggnttgntttttttgggtggnaaaaang

SEQ ID NO: 225 - DNA, 988 bp, Homo Sapiens
  misc_feature (810)..(810): n is a, c, g, or t
  misc_feature (813)..(813): n is a, c, g, or t
  misc_feature (817)..(817): n is a, c, g, or t
  misc_feature (820)..(820): n is a, c, g, or t
  misc_feature (829)..(829): n is a, c, g, or t
  misc_feature (845)..(845): n is a, c, g, or t
  misc_feature (848)..(848): n is a, c, g, or t
  misc_feature (864)..(864): n is a, c, g, or t
  misc_feature (870)..(870): n is a, c, g, or t
  misc_feature (876)..(876): n is a, c, g, or t
  misc_feature (908)..(908): n is a, c, g, or t
  misc_feature (929)..(929): n is a, c, g, or t
  misc_feature (933)..(933): n is a, c, g, or t
  misc_feature (944)..(944): n is a, c, g, or t
  misc_feature (946)..(946): n is a, c, g, or t
  misc_feature (948)..(949): n is a, c, g, or t
  misc_feature (951)..(952): n is a, c, g, or t
  misc_feature (960)..(960): n is a, c, g, or t
  misc_feature (977)..(977): n is a, c, g, or t
  misc_feature (980)..(980): n is a, c, g, or t
  misc_feature (983)..(983): n is a, c, g, or t
  misc_feature (985)..(985): n is a, c, g, or t
atagagaaattactatgagaggatcgcatcaccatcaccatcacggatcctatttaggtgacactatagaatcgtcgacccacgcgtccggcaaaaacttcgaccgagagattggccacaataaccccagtgccatggcagtggagtcattcacggcaacagccccctttgtccaaattggcaggtttttcctctcgtcaggcctcatcgacaaagtcgacaacttcaagtccctgagcctatccaagctggaggaccctcatgtggacatcattcgccgtggagactttttctaccacagcgaaaatcccaagtatccagaggtgggagacttgcgtgtctccttttcctatgctggactgagcggcgatgaccctgacctgggcccagctcacgtggtcactgtgattgcccggcagcggggtgaccagctagtcccattctccaccaagtctggggataccttactgctcctgcaccacggggacttctcagcagaggaggtgtttcatagagaactaaggagcaactccatgaagacctggggcctgcgggcagctggctggatggccatgttcatgggcctcaaccttatgacacggatcctctacaccttggtggactggtttcctgttttccgagacctggtcaacattggcctgaaagcctttgccttctgtgtggccacctcgctgaccctgctgaccgtggcggctggctggctcttctaccgacccctgtgggcccctcctcattgccggcctggccccttgtgcccatccttgttgctcggaacacgggtgccagccnaanaagntgnagtgaaaanacccttggcaccccgnccnaaaacctggcgtgaanccctangaatcnaggtcccttctcttcacctcctgaccccagtnccatgccaaaccaggaacccncggntcaattttggnantnngnnaccccctnctcctttttctgggggnaanaantngca

SEQ ID NO: 226 - DNA, 1173 bp, Homo Sapiens
  misc_feature (2)..(2): n is a, c, g, or t
  misc_feature (15)..(15): n is a, c, g, or t
  misc_feature (450)..(450): n is a, c, g, or t
  misc_feature (760)..(760): n is a, c, g, or t
  misc_feature (771)..(771): n is a, c, g, or t
  misc_feature (816)..(816): n is a, c, g, or t
  misc_feature (820)..(820): n is a, c, g, or t
  misc_feature (865)..(865): n is a, c, g, or t
  misc_feature (883)..(883): n is a, c, g, or t
  misc_feature (899)..(899): n is a, c, g, or t
  misc_feature (912)..(912): n is a, c, g, or t
  misc_feature (932)..(932): n is a, c, g, or t
  misc_feature (935)..(935): n is a, c, g, or t
  misc_feature (966)..(966): n is a, c, g, or t
  misc_feature (970)..(971): n is a, c, g, or t
  misc_feature (976)..(976): n is a, c, g, or t
  misc_feature (995)..(995): n is a, c, g, or t
  misc_feature (1003)..(1004): n is a, c, g, or t
  misc_feature (1015)..(1015): n is a, c, g, or t
  misc_feature (1029)..(1029): n is a, c, g, or t
  misc_feature (1044)..(1044): n is a, c, g, or t
  misc_feature (1057)..(1057): n is a, c, g, or t
  misc_feature (1060)..(1060): n is a, c, g, or t
  misc_feature (1084)..(1084): n is a, c, g, or t
  misc_feature (1095)..(1096): n is a, c, g, or t
  misc_feature (1107)..(1107): n is a, c, g, or t
  misc_feature (1114)..(1114): n is a, c, g, or t
  misc_feature (1121)..(1121): n is a, c, g, or t
  misc_feature (1128)..(1129): n is a, c, g, or t
  misc_feature (1142)..(1142): n is a, c, g, or t
  misc_feature (1146)..(1146): n is a, c, g, or t
  misc_feature (1152)..(1154): n is a, c, g, or t
  misc_feature (1157)..(1157): n is a, c, g, or t
  misc_feature (1160)..(1161): n is a, c, g, or t
  misc_feature (1166)..(1166): n is a, c, g, or t
  misc_feature (1168)..(1168): n is a, c, g, or t
  misc_feature (1173)..(1173): n is a, c, g, or t
antagagaaattacnatgagaggatcgcatcaccatcaccatcacggatcctatttaggtgacactatagaatcgtcgacccacgcgtccgcccacgcgatccgcccacgcgtccgcccacgcgtccgtgaagcggttgggaaagtgtcggtttatcttcgcgccccttgcgttcttgccgcggcttgcctgggcaggtaaagcgcgattgcgagagctcggcaaccctgccgactcagccggaaccggctcccggcccgaggggcgtggtgtcctggtgctccgactccttccgcaggctccttgggacccgcggttccgggagtcccttgctcagggtccctttcctgcagtgaggcgccgtccgccttccctgtgtccccgcagacccccatcatgggcaataccagcagtgagcgcgccgcgctggagcggcatggtggccataanacgccccggagggacagctcggggggcaccaaggacggggacaggcccaagatcctgatggacagccccgaagacgccgacctcttccactccgaggaaatcaaggcaccagagaaggaggaattcctggcctggcagcatgatctggaagtgaatgataaagctcccgcccaggctcggccaacggtgtttcgatggacggggggcggaaaggaagtttacttatctgggtccttcaacaactggagtaaacttcccctcaccagaagccacaataactttgtagccatcctggatctgccggaagganagcatcagtanaagttctttgtggatggtcagtggacgcacgacccttccgagccnatantaaccagccagcttggcacagttaacaaacatcattcaagtgaanaaaaactgactttgaaanaatttgatgctttaantggtggaattccnaaaagtgcttcgaatgtgtntgnaactgtccagtttctcccccaagaaccctancatnnagaancccctaagttttgcaaaanccgaaaanngcttttcgggnaaccccctaatttntccccccaaaattcnttcaaggttcatnctnaaaaaaaggaaacggggaatttcntgggattcaanntttgctttctngaacccnaatccgntattggnnaaaccccctaaanccgntttctnnnaanganngaaananggggn

SEQ ID NO: 227 - DNA, 1105 bp, Homo Sapiens
  misc_feature (911)..(911): n is a, c, g, or t
  misc_feature (929)..(929): n is a, c, g, or t
  misc_feature (938)..(938): n is a, c, g, or t
  misc_feature (942)..(942): n is a, c, g, or t
  misc_feature (952)..(952): n is a, c, g, or t
  misc_feature (959)..(959): n is a, c, g, or t
  misc_feature (969)..(969): n is a, c, g, or t
  misc_feature (980)..(980): n is a, c, g, or t
  misc_feature (983)..(983): n is a, c, g, or t
  misc_feature (985)..(986): n is a, c, g, or t
  misc_feature (1039)..(1039): n is a, c, g, or t
  misc_feature (1071)..(1071): n is a, c, g, or t
  misc_feature (1082)..(1082): n is a, c, g, or t
  misc_feature (1090)..(1105): n is a, c, g, or t
aattagagaaattactatgagaggatcgcatcaccatcaccatcacggatcctatttaggtgacactatagaatcgtcgacccacgcgtccgcccacgcgtccggtgatgttcaagaaccaactgaaccagaggatgaccttgacattatgcttggcaataaaaagaagaaaaagaagaatgttaagttcccagatgaggatgaaatactagagaaagatgaagctctagaagatgaagacaacaaaaaagatgatggtatctcattcagtaatcagacaggccctgcttgggcaggctcagaaagagactacacatacgaggagctgctgaatcgagtgttcaacatcatgagggaaaagaatccagatatggttgctggggagaaaaggaaatttgtcatgaaacctccacaagtcgtccgagtaggaaccaagaaaacttcttttgtcaactttacagatatctgtaaactattacatcgtcagcccaaacatctccttgcatttttgttggctgaattgggtacaagtggttctatagatggtaataaccaacttgtaatcaaaggaagattccaacagaaacagatagaaaatgtcttgagaagatatatcaaggaatatgtcacttgtcacacatgccgatcaccggacacaatcctgcagaaggacacacgactctatttcctacagtgcgaaacttgtcattctagatgttctgttgccagtatcaaaaccggcttccaggctgtcacgggcaagcgagcacagctccgtgccaaagctaactaatttgctaatcactgattttgcaaagcttgttgtggagatgtggctggacaggtttgccatcagagtggatataccgttgtattaaaaacaagataaaaagctgccaagattttttggncgagtggttggtctgaantccttgcangacnctgatgctcnagctgtngacatactcnttgcctacttnacncnngtcaaaaaacgtgaattggggtaaggagggctttttaaaatcgttcaaaactnctgtaaatgcagataattaaagttttttaacnggggattcttncaaaaaannnnnnnnnnnnnnnn

SEQ ID NO: 228 - DNA, 948 bp, Homo Sapiens
  misc_feature (725)..(725): n is a, c, g, or t
  misc_feature (743)..(743): n is a, c, g, or t
  misc_feature (798)..(798): n is a, c, g, or t
  misc_feature (816)..(816): n is a, c, g, or t
  misc_feature (832)..(832): n is a, c, g, or t
  misc_feature (840)..(840): n is a, c, g, or t
  misc_feature (849)..(849): n is a, c, g, or t
  misc_feature (853)..(853): n is a, c, g, or t
  misc_feature (858)..(858): n is a, c, g, or t
  misc_feature (862)..(862): n is a, c, g, or t
  misc_feature (867)..(867): n is a, c, g, or t
  misc_feature (880)..(880): n is a, c, g, or t
  misc_feature (898)..(898): n is a, c, g, or t
  misc_feature (900)..(901): n is a, c, g, or t
  misc_feature (904)..(904): n is a, c, g, or t
  misc_feature (937)..(937): n is a, c, g, or t
gaatagagagattactatgagaggatcgcatcaccatcaccatcacggatcctatttaggtgacactatagaatcgtcgacccacgcgtccgggctcgatgtgacactgggtccggtaccggagatcggtggatctgaggcgccagcacctcagaacaaggaccagaaagctgttgatccagaagacgacttccagcgagagatgagtttctatcgccaagcccaggccgcagtgcttgcagtcttaccccgcctccatcagctcaaagtccctaccaagcgacccactgattattttgcggaaatggccaaatctgatctgcagatgcagaagattcgacagaagctgcagactaaacaggctgccatggagaggtctgaaaaagctaagcaactgcgagcacttaggaaatacgggaagaaggtgcaaacggaggttcttcagaagaggcagcaggagaaagcccatatgatgaatgctattaagaaatatcagaaaggcttctctgataaactggatttccttgagggagatcagaaacctctggcacagcacaagaaggcaggagccaaaggccagcagatgaggaaggggcccagtgctaaacgacggtataaaaaccagaagtttggttttggtggaaagaagaaaggctcaaagtggaacactcgggagagctatgatgatgtatctagcttccgggccaagacagctcatggcagangcctcaagaggcctggcnaagaaagggtcaaataagagacctggaaaacgaaccagagagaagatgaagaacngaacccccctaattagcntctttgaatacaaagnaacccaanaaaagggangaanactcnccantttcncgaccccactttngatccccttctggttggngnnctngttggaaaacatttcttttccattaaacttaangaaaaaatttt

SEQ ID NO: 229 - DNA, 887 bp, Homo Sapiens
tgagaggatcgcatcaccatcaccatcacggatcctatttaggtgacactatagaatcgtcgacccacgcgtccgcgacagcctccgccacatcctccacctctcttggtccagcgagcgttgccgggccagggtcaagcggagggctccgacggcgcggacggagcgaagcgccgagccatggcgcaccaaacgggcatccacgccacggaagagctgaaggaattctttgccaaggcacgggctggctctgtgcggctcatcaaggttgtgattgaggacgctcgtgctgggtgcctcgcaggagccagtaggccgctgggatcaggactatgacagggccgtgctgccactgctggacgcccagcagccctgctacctgctctaccgcctcgactcacagaatgctcagggcttcgaatggctcttcctcgcctggtcgcctgataactcccccgtgcggctgaagatgctgtacgcggccacgcgggccacagtgaaaaaggagtttggaggtggccacatcaaggatgagctcttcgggactgtgaaggatgacctctcttttgctgggtaccagaaacacctgtcgtcctgtgcggcacctgccccgctgacctcggctgagagagagctccagcagatccgcattaacgaggtgaagacagagatcagtgtggaaagcaagcaccagaccctgcagggcctcgccttccccctgcagcctgaggcccagcgggcactccagcagctcaagcagaaaatgggtcaactacatccagatgaagctggacctagagcgggaaaccattgagctggtgcacacagagcccacggatgtggcccagctgccctcccgggtgccccgagatgctgcccgctaccac

SEQ ID NO: 230 - DNA, 1105 bp, Homo Sapiens
  misc_feature (1)..(1): n is a, c, g, or t
  misc_feature (842)..(842): n is a, c, g, or t
  misc_feature (897)..(897): n is a, c, g, or t
  misc_feature (914)..(914): n is a, c, g, or t
  misc_feature (965)..(965): n is a, c, g, or t
  misc_feature (992)..(992): n is a, c, g, or t
  misc_feature (1007)..(1007): n is a, c, g, or t
  misc_feature (1025)..(1025): n is a, c, g, or t
  misc_feature (1027)..(1027): n is a, c, g, or t
  misc_feature (1038)..(1038): n is a, c, g, or t
  misc_feature (1047)..(1047): n is a, c, g, or t
  misc_feature (1050)..(1050): n is a, c, g, or t
  misc_feature (1053)..(1053): n is a, c, g, or t
  misc_feature (1058)..(1059): n is a, c, g, or t
  misc_feature (1066)..(1066): n is a, c, g, or t
  misc_feature (1069)..(1069): n is a, c, g, or t
  misc_feature (1079)..(1079): n is a, c, g, or t
  misc_feature (1086)..(1087): n is a, c, g, or t
  misc_feature (1090)..(1091): n is a, c, g, or t
  misc_feature (1098)..(1098): n is a, c, g, or t
  misc_feature (1103)..(1103): n is a, c, g, or t
naattagagaaattactatgagaggatcgcatcaccatcaccatcacggatcctatttaggtgacactatagaatcgtcgacccacgcgtccgggcgggcggggcccgggaggtgctcacactgcagttgggacattttgccggtttcgtgggcgcgcactggtggaaccagcaggatgctgcgctgggccgagcgaccgattccaaggagcccccgggagagctgtgccccgacgtcctgtatcgtacgggccggacgctgcacggccaggagacctacacgccgcgactcatcctcatggatctgaagggtagtttgagctccctaaaagaggaaggtggactctacagggacaaacagttggatgctgcaatagcatggcaggggaagctcaccacacacaaagaggaactctatcccaagaacccttatctccaagactttctgagtgcagagggagtgctgagtagtgatggtgtctggagggtcaaatccattcccaatggcaaaggttcctcaccactccccaccgctacaactccaaaaccacttatccctacagaggccagcatcagggtctggtcagacttcctcagagtccatctccatccccggagcatctgtatgattcagaagtacaaccacgatggggaagcaggtcggctggaggcttttggccaaggggaaagtgtcctaaaggaacccaagtaccaggaagagctggaggacaggctgcatttctacgtggaggaatgtgactacttgcagggcttccagatcctgtgtgacctgcacgatggcttctctggggtaggcgcgaaggcggcaaaactgctacaanatgaatattcagggcggggaataataacctggggcctgctacctggtcccctacnatcgtggggaggcccanagaaacatctatcgtctattaaacacagctttttggtctcgtgcacctgantgctcacagctctcttgtctgcccctngtccttgggtgggancctggggcctgcaaaccnanccacctgtcancttcccttnacntgnattannaatgccnctntgcccttccnctggaanngcnntctgggntaaancc

SEQ ID NO: 231 - DNA, 887 bp, Homo Sapiens
tgagaggtcgcatcaccatcaccatcacggatcctatttaggtgacactatagaatcgtcgacccacgcgtccggccgagcgcgccccgtccctcgcgcgcgatgctcccctggacggcgctcggcctggccctgagcttgcggctggcgctggcgcggagcggcgcggagcgcggtccaccagcatcagccccccgaggggacctgatgttcctgctggacagctcagccagcgtctctcactacgagttctcccgggttcgggagtttgtggggcagctggtggctccactgcccctgggcaccggggccctgcgtgccagtctggtgcacgtgggcagtcggccatacaccgagttccccttcggccagcacagctcgggtgaggctgcccaggatgcggtgcgtgcttctgcccagcgcatgggtgacacccacactggcctggcgctggtctatgccaaggaacagctgtttgctgaagcatcaggtgcccggccaggggtgcccaaagtgctggtgtgggtgacagatggcggctccagcgaccctgtgggcccccccatgcaggagctcaaggacctgggcgtcaccgtgttcattgtcagcaccggccgaggcaacttcctggagctgtcagccgctgcctcagcccctgccgagaagcacctgcactttgtggacgtggatgacctgcacatcattgtccaagagctgaggggctccattctcgacgcgatgcggccgctccctatagtgagtcgtattaagcttaattagctgagcttggactcctgttgatagatccagtaatgacctcagaactccatctggatttgttcagaacgctcggttgccgccgggcgttttttattggtgagaatcca

SEQ ID NO: 232 - DNA, 1157 bp, Homo Sapiens
  misc_feature (943)..(943): n is a, c, g, or t
  misc_feature (954)..(954): n is a, c, g, or t
  misc_feature (956)..(956): n is a, c, g, or t
  misc_feature (997)..(997): n is a, c, g, or t
  misc_feature (1006)..(1007): n is a, c, g, or t
  misc_feature (1019)..(1019): n is a, c, g, or t
  misc_feature (1027)..(1027): n is a, c, g, or t
  misc_feature (1041)..(1041): n is a, c, g, or t
  misc_feature (1066)..(1066): n is a, c, g, or t
  misc_feature (1078)..(1078): n is a, c, g, or t
  misc_feature (1090)..(1090): n is a, c, g, or t
  misc_feature (1100)..(1100): n is a, c, g, or t
  misc_feature (1117)..(1117): n is a, c, g, or t
  misc_feature (1126)..(1126): n is a, c, g, or t
  misc_feature (1128)..(1128): n is a, c, g, or t
  misc_feature (1136)..(1137): n is a, c, g, or t
  misc_feature (1145)..(1145): n is a, c, g, or t
  misc_feature (1151)..(1151): n is a, c, g, or t
aatagagaaattactatgagaggatcgcatcaccatcaccatcacggatcctatttaggtgacactatagaatcgtcgacccacgcgtccgcccacgcgtccggtcatcataaagtttctgtttcacccgtcgtccatgttcgaggactctgtgaatctgtggtggaagcagacctcgtggaagcgctggaaaaatttgggacaatatgctatgtgatgatgatgccatttaaacgacaggctctagtggaatttgaaaacatagatagtgccaaagaatgtgtgacatttgctgcagatgaacccgtgtacattgctggtcaacaggcttttttcaactattctacaagcaaaaggatcactcggccaggaaatactgatgatccatcaggaggcaacaaagttcttctgctctcaattcagaatccgctttatccaattacagtggatgttttatatactgtatgcaaccctgttggcaaagtgcaacgtattgttatattcaagagaaatgggatacaagcaatggttgagtttgaatcagtcctttgtgcccagaaagctaaagcagcactcaatggagctgatatatatgctggatgttgcacactaaaaattgaatatgcacggccaactcgtctaaatgttattaggaatgacaatgacagttgggactacactaaaccatatttgggaagacgagatagaggaaagggtcgccagagacaagccattttgggagaacacccttcttcgtttagacatgatggctatggatcccatggtccattattgcctttaccaagtcgttacagaatgggctctcgagatacacctgaacttgttgcttatccattaccacaggcttcttcctcttacatgcatggaggaaatcccctctggttcagttgtaatggttagtggattacatcaactaaaatgnaattgttcaanantcttccacctggttctgcttatatggaaatattgaaaaggntaaaatttnngaaaaccattcntggtacancccttggtaaaaanggggtgaagaatatgctgtaaaaanacttgtcccccnccttaaaaatgnccaattattngggaaaaaacttaatgnttggcgggntnaaaaaaannttcagttnttccangtcaaa

SEQ ID NO: 233 - DNA, 1070 bp, Homo Sapiens
  misc_feature (815)..(815): n is a, c, g, or t
  misc_feature (845)..(845): n is a, c, g, or t
  misc_feature (937)..(938): n is a, c, g, or t
  misc_feature (941)..(941): n is a, c, g, or t
  misc_feature (946)..(946): n is a, c, g, or t
  misc_feature (950)..(950): n is a, c, g, or t
  misc_feature (962)..(962): n is a, c, g, or t
  misc_feature (966)..(966): n is a, c, g, or t
  misc_feature (984)..(985): n is a, c, g, or t
  misc_feature (991)..(991): n is a, c, g, or t
  misc_feature (993)..(993): n is a, c, g, or t
  misc_feature (996)..(996): n is a, c, g, or t
  misc_feature (999)..(999): n is a, c, g, or t
  misc_feature (1004)..(1004): n is a, c, g, or t
  misc_feature (1012)..(1012): n is a, c, g, or t
  misc_feature (1014)..(1014): n is a, c, g, or t
  misc_feature (1019)..(1019): n is a, c, g, or t
  misc_feature (1029)..(1029): n is a, c, g, or t
  misc_feature (1031)..(1031): n is a, c, g, or t
  misc_feature (1047)..(1047): n is a, c, g, or t
  misc_feature (1058)..(1058): n is a, c, g, or t
  misc_feature (1063)..(1063): n is a, c, g, or t
  misc_feature (1065)..(1065): n is a, c, g, or t
agaaattaactatgagaggatcgcatcaccatcaccatcacggatcctatttaggtgacactatagaatcgtcgacccacgcgtccggtcagctctacaagctgccctgggtgtgtgaggagggggccgggatccccaccgtcctgcagggccacatcgactgtggctccctgcttggctaccgcgctgtctaccgcatgtgcttcgccacggcggccttcttcttctttttcaccctgctcatgctctgcgtgagcagcagccgggacccccgggctgccatccagaatgggttttggttctttaagttcctgatcctggtgggcctcaccgtgggtgccttctacattcctgacggctccttcaccaacatctggttctacttcggcgtcgtgggctccttcctcttcatcctcatccagctggtgctgctcatcgactttgcgcactcctggaaccagcggtggctgggcaaggccgaggagtgcgattcccgtgcctggtacgcaggcctcttcttcttcactctcctcttctacttgctgtcgatcgcggccgtggcgctgatgttcatgtactacactgagcccagcggctgccacgagggcaaggtcttcatcagcctcaacctcaccttctgtgtctgcgtgtccatcgctgctgtcctgcccaaggtccaggacgcccagcccaactcgggtctgctgcaggcctcggtcatcaccctctacaccatgtttgtcacctggtcagccctatccagtatccctgaacagaaatgcaacccccatttgccaacccagctgggcaacganacagttgtggcaggccccgagggctatganacccagtggtgggatgccccgagcattgtgggcctcatcatcttcctcctgtgcaccctcttcatcagtctgcgctcctcaaaacaaccggnnagngaaanagcntgaagcaaaccnagantgcccacctatgctaaannccacanancancancacancaggtggnancctgngaaggccggncnttgaaaaaaaaaaagnaaggggtcacntaaantnatcct

SEQ ID NO: 234 - DNA, 1153 bp, Homo Sapiens
  misc_feature (872)..(872): n is a, c, g, or t
  misc_feature (888)..(888): n is a, c, g, or t
  misc_feature (931)..(931): n is a, c, g, or t
  misc_feature (949)..(949): n is a, c, g, or t
  misc_feature (954)..(954): n is a, c, g, or t
  misc_feature (990)..(990): n is a, c, g, or t
  misc_feature (992)..(992): n is a, c, g, or t
  misc_feature (994)..(994): n is a, c, g, or t
  misc_feature (997)..(997): n is a, c, g, or t
  misc_feature (1001)..(1001): n is a, c, g, or t
  misc_feature (1004)..(1004): n is a, c, g, or t
  misc_feature (1006)..(1006): n is a, c, g, or t
  misc_feature (1010)..(1010): n is a, c, g, or t
  misc_feature (1012)..(1012): n is a, c, g, or t
  misc_feature (1020)..(1020): n is a, c, g, or t
  misc_feature (1024)..(1024): n is a, c, g, or t
  misc_feature (1036)..(1036): n is a, c, g, or t
  misc_feature (1040)..(1040): n is a, c, g, or t
  misc_feature (1045)..(1045): n is a, c, g, or t
  misc_feature (1049)..(1049): n is a, c, g, or t
  misc_feature (1076)..(1076): n is a, c, g, or t
  misc_feature (1084)..(1085): n is a, c, g, or t
  misc_feature (1110)..(1110): n is a, c, g, or t
  misc_feature (1129)..(1129): n is a, c, g, or t
  misc_feature (1136)..(1136): n is a, c, g, or t
  misc_feature (1140)..(1142): n is a, c, g, or t
  misc_feature (1146)..(1146): n is a, c, g, or t
tagagaaattactatgagaggatcgcatcaccatcaccatcacggatcctatttaggtgacactatagaatcgtcgacccacgcgtccgcggacgcgtgggcggacgcgtgggtcctggccgggggcgtcgccgctgccgtctccaagaccgcggtcgcccccatcgagagggtcaaactgctgctgcaggtccagcatgccagcaaacagatcagtgctgagaagcagtacaaagggatcattgattgtgtggtgagaatccctaaggagcagggcttcctctccttctggaggggtaacctggccaacgtgatccgttacttccccacccaagctctcaacttcgccttcaaggacaagtacaagcagctcttcttagggggtgtggatcggcataagcagttctggcgctactttgctggtaacctggcgtccggtggggccgctggggccacctccctttgctttgtctacccgctggactttgctaggaccaggttggctgctgatgtgggcaagggcgccgcccagcgtgagttccatggtctgggcgactgtatcatcaagatcttcaagtctgatggcctgagggggctctaccagggtttcaacgtctctgtccaaggcatcattatctatagagctgcctacttcggagtctatgatactgccaaggggatgctgcctgaccccaagaacgtgcacatttttgtgagctggatgattgctcaaagtgtgacggcagtcgcagggctggtgtcctacccctttgacactgttcgtcgtaaaatgatgatgcagtccggccggaaaggggccgatattatgtacacggggacagttgactgctggaggaagattgcaaaagacnaaggagccaaggcctncttcaaaggtgcctggtccaatgtgctgaaaagcatgggcggngctttgtattggtgttgnatgangaaatcaaaaatatgtctaatgtaattaaaaacaantncncanattnacngngaantnatttaaanttcncaaatccattgngggnttaanaaantatcccaagggaaataaaaaatctggnaaaaaacnnactgaaaggaaacctcaaaaaaaangctttattgattgttcatnaaccccnattnnntttngaattaa

SEQ ID NO: 235 - DNA, 1063 bp, Homo Sapiens
  misc_feature (3)..(3): n is a, c, g, or t
  misc_feature (858)..(858): n is a, c, g, or t
  misc_feature (867)..(867): n is a, c, g, or t
  misc_feature (909)..(909): n is a, c, g, or t
  misc_feature (940)..(940): n is a, c, g, or t
  misc_feature (943)..(943): n is a, c, g, or t
  misc_feature (945)..(945): n is a, c, g, or t
  misc_feature (949)..(950): n is a, c, g, or t
  misc_feature (956)..(956): n is a, c, g, or t
  misc_feature (968)..(968): n is a, c, g, or t
  misc_feature (974)..(974): n is a, c, g, or t
  misc_feature (1000)..(1000): n is a, c, g, or t
  misc_feature (1008)..(1008): n is a, c, g, or t
  misc_feature (1018)..(1018): n is a, c, g, or t
  misc_feature (1029)..(1029): n is a, c, g, or t
  misc_feature (1045)..(1045): n is a, c, g, or t
  misc_feature (1050)..(1051): n is a, c, g, or t
  misc_feature (1056)..(1059): n is a, c, g, or t
  misc_feature (1063)..(1063): n is a, c, g, or t
atngaggaaattactatgagaggatcgcatcaccatcaccatcacggatcctatttaggtgacactatagaatcgtcgacccacgcgtccgcagagccttcccactgtggacacctcggcccaggcggcccctcagacctacgccgaatatgccatctcacagcctctggaaggggctggggccacgtgccccacagggtcagagcccctggcaggagagacgcccaaccaggccctgaaacccggggcaaaatccaacagcatcattgtgagccctcggcagaggggcaatcccgtactgaagttcgtgcgcaacgtgccctgggaatttggcgacgtaattcccgactatgtgctgggccagagcacctgtgccctgttcctcagcctccgctaccacaacctgcacccagactacatccatgggcggctgcagagcctggggaagaacttcgccttgcgggtcctgcttgtccaggtggatgtgaaagatccccagcaggccctcaaggagctggctaagatgtgtatcctggccgactgcacattgatcctcgcctggagccccgaggaagctgggcggtacctggagacctacaaggcctatgagcagaaaccagcggacctcctgatggagaagctagagcaggacttcgtctcccggtctctggaacagctcatcgccgcatcaagagaagatctggccttatgcccaggcctgggccctcagaaagcccggaggctgtttgatgtcctgcacgagcccttcttgaaagtaccctgatgaccccagctgccaaggaaacccccagtgtaataataaatcgtcctcccaggccagggctcctgctggctgcnctggtgcantctctgggggaggggattctgggggtgtcaccttctggtggncccaggtggggcaccttcagcttttctttanttncntcanntttccnggggggcaaaantaaaanagggctggctgctggctgctttcttnccgctttnttgtcccggncttgtgggaancctcctcccccaaaanttttnnaattnnnntggn

SEQ ID NO: 236 - DNA, 543 bp, Homo Sapiens
  misc_feature (13)..(13): n is a, c, g, or t
tagagaaaattanctatggagaggatcgcatcaccatcaccatcacggatcctatttaggtgacactatagaatcgtcgacccacgcgtccgcccacgcgtccgctcgtacaaagcagactgcccgcaaatcgaccggtggtaaagcacccaggaagcaactggctacaaaagccgctcgcaagagtgcgccctctactggaggggtgaagaaacctcatcgttacaggcctggtactgtggcgctccgtgaaattagacgttatcagaagtccactgaacttctgattcgcaaacttcccttccagcgtctggtgcgagaaattgctcaggactttaaaacagatctgcgcttccagagcgcagctatcggtgctttgcaggaggcaagtgaggcctatctggttggcctttttgaagacaccaacctgtgtgctatccatgccaaacgtgtaacaattatgccaaaagacatccagctagcacgccgcatacgtggagaacgtgcttaagaatccactatgatgggaaacatttcattctc

SEQ ID NO: 237 - DNA, 1156 bp, Homo Sapiens
  misc_feature (811)..(811): n is a, c, g, or t
  misc_feature (856)..(856): n is a, c, g, or t
  misc_feature (893)..(893): n is a, c, g, or t
  misc_feature (922)..(922): n is a, c, g, or t
  misc_feature (924)..(924): n is a, c, g, or t
  misc_feature (934)..(934): n is a, c, g, or t
  misc_feature (941)..(941): n is a, c, g, or t
  misc_feature (969)..(969): n is a, c, g, or t
  misc_feature (991)..(991): n is a, c, g, or t
  misc_feature (1003)..(1003): n is a, c, g, or t
  misc_feature (1006)..(1006): n is a, c, g, or t
  misc_feature (1008)..(1008): n is a, c, g, or t
  misc_feature (1012)..(1012): n is a, c, g, or t
  misc_feature (1019)..(1019): n is a, c, g, or t
  misc_feature (1022)..(1022): n is a, c, g, or t
  misc_feature (1040)..(1041): n is a, c, g, or t
  misc_feature (1049)..(1049): n is a, c, g, or t
  misc_feature (1060)..(1060): n is a, c, g, or t
  misc_feature (1088)..(1088): n is a, c, g, or t
  misc_feature (1096)..(1096): n is a, c, g, or t
  misc_feature (1098)..(1098): n is a, c, g, or t
  misc_feature (1118)..(1118): n is a, c, g, or t
  misc_feature (1120)..(1120): n is a, c, g, or t
  misc_feature (1122)..(1122): n is a, c, g, or t
  misc_feature (1129)..(1129): n is a, c, g, or t
  misc_feature (1133)..(1133): n is a, c, g, or t
  misc_feature (1137)..(1137): n is a, c, g, or t
  misc_feature (1139)..(1140): n is a, c, g, or t
  misc_feature (1143)..(1143): n is a, c, g, or t
  misc_feature (1146)..(1146): n is a, c, g, or t
  misc_feature (1153)..(1153): n is a, c, g, or t
aatagagaaattactatgagaggatcgcatcaccatcaccatcacggatcctatttaggtgacactatagaatcgtcgacccacgcgtccgcccacgcgtccgggcgcggagacgcttctggaaggaacgccgcgatggctgcgcagggagagccccaggtccagttcaaacttgtattggttggtgatggtggtactggaaaaacgaccttcgtgaaacgtcatttgactggtgaatttgagaagaagtatgtagccaccttgggtgttgaggttcatcccctagtgttccacaccaacagaggacctattaagttcaatgtatgggacacagccggccaggagaaattcggtggactgagagatggctattatatccaagcccagtgtgccatcataatgtttgatgtaacatcgagagttacttacaagaatgtgcctaactggcatagagatctggtacgagtgtgtgaaaacatccccattgtgttgtgtggcaacaaagtggatattaaggacaggaaagtgaaggcgaaatccattgtcttccaccgaaagaagaatcttcagtactacgacatttctgccaaaagtaactacaactttgaaaagcccttcctctggcttgctaggaagctcattggagaccctaacttggaatttgttgccatgcctgctctcgccccaccagaagttgtcatggacccagctttggcagcacagtatgagcacgacttagaggttgctcagacaactgctctcccggatgaggatgatgacctgtgagaatgaagctggagcccagcgtcanaagtctagttttataggcagctgtcctgtgatgtcagcggtgcancgtgtgtgccacctcattattatctagctaagcggancatgtgcttcatctgtgggatgctgaagnanatgaatggcnttccgantgaatgtggcagtttaaaaataacttcnttgtttggacctgcatatttanctgtttggaacncantngatnccttganttncaatataaaactgctgcnntcccatcncaatattcagngggaaatcttgttggtacggccttcccnttcctttncnttaaaaccaaaaaagttttntncnaaattcnaacnaggnannccnccntgtttanaat

SEQ ID NO: 238 - DNA, 939 bp, Homo Sapiens
tatgagaggtcgcatcaccatcaccatcacggatcctatttaggtgacactatagaatcgtcgacccacgcgtccggttctaagagggacatggcctccaatgaaggcagtcgcatcagtgctgcctctgtggccagcactgccattgctgcggcccagtgggccatctcacaggcctcccaaggtggggagggtacctgggccacctccgaggagccgccggtcgactacagctactaccaacaggatgagggctatggcaacagccagggcacagagtcttccctctatgcccatggctacctcaagggcaccaagggccctggcatcactggaaccaaaggggatcccactggagcaggtcccgaggcctccctagagcctggggccgactctgtgtcgatgcaggctttctctcgcgcccagcctggtgctgctcctggcatctaccaacaatcagccgaggcgagcagtagccagggcactgctgccaacagccagtcgtataccatcatgtcacccgctgtgctcaaatctgagctccagagccctacccatcctagttctgctctcccaccggctaccagccccactgcccaggaatcctacagccagtaccctgttcccgacgtctctacctaccagtacgatgagacctccggctactactatgacccccagaccggcctctactatgaccccaactcccagtattactacaatgctcagagccagcagtacctgtactgggatggggagaggcggacctatgttcccgccctggagcagtcggccgacggacataaggagacaggggcaccctcgaaggagggcaaagagaagaaggagaagcacaagaccaagacagctcaacagattgccaaggacatggaacgctgggcccgcagtctcaacaaacaaaaagaaaacttcaaaaat

SEQ ID NO: 239 - DNA, 948 bp, Homo Sapiens
  misc_feature (732)..(732): n is a, c, g, or t
  misc_feature (750)..(750): n is a, c, g, or t
  misc_feature (792)..(792): n is a, c, g, or t
  misc_feature (807)..(807): n is a, c, g, or t
  misc_feature (815)..(815): n is a, c, g, or t
  misc_feature (834)..(834): n is a, c, g, or t
  misc_feature (849)..(849): n is a, c, g, or t
  misc_feature (853)..(853): n is a, c, g, or t
  misc_feature (856)..(856): n is a, c, g, or t
  misc_feature (866)..(866): n is a, c, g, or t
  misc_feature (875)..(875): n is a, c, g, or t
  misc_feature (881)..(882): n is a, c, g, or t
  misc_feature (900)..(900): n is a, c, g, or t
  misc_feature (902)..(902): n is a, c, g, or t
  misc_feature (914)..(914): n is a, c, g, or t
  misc_feature (918)..(918): n is a, c, g, or t
  misc_feature (921)..(921): n is a, c, g, or t
  misc_feature (924)..(926): n is a, c, g, or t
  misc_feature (935)..(935): n is a, c, g, or t
  misc_feature (941)..(941): n is a, c, g, or t
  misc_feature (945)..(946): n is a, c, g, or t
  misc_feature (948)..(948): n is a, c, g, or t
attagagaaattactatgagaggatcgcatcaccatcaccatcacggatcctatttaggtgacactatagaatcgtcgacccacgcgtccgcctcccctgagctcgagtcttcggatgactcctacgtgtccgctggagaagagcccctagaggcccctgtgtttgagatccccctgcagaatgtggtggtggcaccaggggcagatgtgctgctcaagtgtatcatcactgccaaccccccgccccaagtgtcctggcacaaggatgggtcagcgctgcgcagcgagggccgcctcctcctccgggctgagggtgagcggcacaccctgctgctcagggaggccagggcagcagatgccgggagctatatggccaccgccaccaacgagctgggccaggccacctgtgccgcctcactgaccgtgagacccggtgggtctacatcccctttcagcagccccatcacctccgacgaggaatacctgagccccccagaggagttcccagagcctggggagacctggccgcgaacccccaccatgaagcccagtcccagccagaaccgccgttcttctgacactggctccaaggcaccccccaccttcaaggtctcacttatggaccagtcagtaagagaaggccaagatgtcatcatgagcatccgcgtgcagggggagcccaagcctgtggtctcctggctgaaaaaccgccagcccgtgcgcccagaccancggcgctttgcggaggangctgaaggtgggctgtgccggctgcggatcctggctgcaaancgtggcgatgctggntttctacncttgcaagcggtcaatgantatggtgctcggcantgcnagnccgcttggangtccaagcnagtganntcagggggccaccttggntncccccgctaccnttcnaanccnnncccttgttnaaggancttnngn

SEQ ID NO: 240 - DNA, 1277 bp, Homo Sapiens
  misc_feature (922)..(922): n is a, c, g, or t
  misc_feature (946)..(946): n is a, c, g, or t
  misc_feature (1005)..(1005): n is a, c, g, or t
  misc_feature (1008)..(1008): n is a, c, g, or t
  misc_feature (1022)..(1022): n is a, c, g, or t
  misc_feature (1039)..(1039): n is a, c, g, or t
  misc_feature (1047)..(1047): n is a, c, g, or t
  misc_feature (1051)..(1051): n is a, c, g, or t
  misc_feature (1062)..(1062): n is a, c, g, or t
  misc_feature (1064)..(1064): n is a, c, g, or t
  misc_feature (1071)..(1071): n is a, c, g, or t
  misc_feature (1083)..(1083): n is a, c, g, or t
  misc_feature (1087)..(1087): n is a, c, g, or t
  misc_feature (1100)..(1101): n is a, c, g, or t
  misc_feature (1118)..(1118): n is a, c, g, or t
  misc_feature (1123)..(1123): n is a, c, g, or t
  misc_feature (1125)..(1125): n is a, c, g, or t
  misc_feature (1131)..(1131): n is a, c, g, or t
  misc_feature (1136)..(1136): n is a, c, g, or t
  misc_feature (1143)..(1143): n is a, c, g, or t
  misc_feature (1154)..(1154): n is a, c, g, or t
  misc_feature (1162)..(1162): n is a, c, g, or t
  misc_feature (1171)..(1171): n is a, c, g, or t
  misc_feature (1180)..(1180): n is a, c, g, or t
  misc_feature (1184)..(1184): n is a, c, g, or t
  misc_feature (1186)..(1186): n is a, c, g, or t
  misc_feature (1190)..(1191): n is a, c, g, or t
  misc_feature (1194)..(1195): n is a, c, g, or t
  misc_feature (1211)..(1211): n is a, c, g, or t
  misc_feature (1222)..(1222): n is a, c, g, or t
  misc_feature (1225)..(1225): n is a, c, g, or t
  misc_feature (1230)..(1230): n is a, c, g, or t
  misc_feature (1240)..(1240): n is a, c, g, or t
  misc_feature (1243)..(1243): n is a, c, g, or t
  misc_feature (1262)..(1262): n is a, c, g, or t
  misc_feature (1264)..(1264): n is a, c, g, or t
  misc_feature (1268)..(1268): n is a, c, g, or t
  misc_feature (1277)..(1277): n is a, c, g, or t
atagagaaaattactatgagaggatcgcatcaccatcaccatcacggatcctatttaggtgacactatagaatcgtcgacccacgcgtccgcccttttccggtcggcgtggtcttgcgagtggagtgtccgctgtgcccgggcctgcaccatgagcgtcccggccttcatcgacatcagtgaagaagatcaggctgctgagcttcgtgcttatctgaaatctaaaggagctgagatttcagaagagaactcggaaggtggacttcatgttgatttagctcaaattattgaagcctgtgatgtgtgtctgaaggaggatgataaagatgttgaaagtgtgatgaacagtgtggtatccctactcttgatcctggaaccagacaagcaagaagctttgattgaaagcctatgtgaaaagctggtcaaatttcgcgaaggtgaacgcccgtctctgagactgcagttgttaagcaaccttttccacgggatggataagaatactcctgtaagatacacagtgtattgcagccttattaaagtggcagcatcttgtggggccatccagtacatcccaactgagctggatcaagttagaaaatggatttctgactggaatctcaccactgaaaaaaagcacacccttttaagactactttatgaggcacttgtggattgtaagaagagtgatgctgcttcaaaagtcatggtggaattgctcggaagttacacagaggacaatgcttcccaggctcgagttgatgcccacaggtgtattgtacgagcattgaaagatccaaatgcatttctttttgaccaccttcttactttaaaaccagtcaagtttttggaaggcgagcttattcatgatcttttaaccatttttgtgagtgctaaaattggcatcatatgtcaagttttatcanaataataaagacttcattgattcncttggcctgttacatgaacagaatatggcaaaaatgaaactacttacttttatgggaanggncagtaaaaaaaaanggaaatttcttttgacncaatgcancaanaacttcaaatngnacctgangatgttgaaacntttngttattgaccccnnaaaaactaaaatggtcnacttncnaaaatngatcnaaccccnaaaaaaaatanttgtccanccaaacccnccctcgganattngnaaannccnngggcaaaaccttttgnaccccttaagnccngaaanaaaatttaanaangggaaaaaccccctttgancntttngaacccggn

SEQ ID NO: 241 - DNA, 1179 bp, Homo Sapiens
  misc_feature (797)..(797): n is a, c, g, or t
  misc_feature (807)..(807): n is a, c, g, or t
  misc_feature (850)..(850): n is a, c, g, or t
  misc_feature (930)..(930): n is a, c, g, or t
  misc_feature (935)..(935): n is a, c, g, or t
  misc_feature (944)..(944): n is a, c, g, or t
  misc_feature (971)..(971): n is a, c, g, or t
  misc_feature (981)..(981): n is a, c, g, or t
  misc_feature (985)..(985): n is a, c, g, or t
  misc_feature (1001)..(1001): n is a, c, g, or t
  misc_feature (1007)..(1007): n is a, c, g, or t
  misc_feature (1026)..(1026): n is a, c, g, or t
  misc_feature (1030)..(1030): n is a, c, g, or t
  misc_feature (1038)..(1038): n is a, c, g, or t
  misc_feature (1042)..(1042): n is a, c, g, or t
  misc_feature (1045)..(1045): n is a, c, g, or t
  misc_feature (1047)..(1047): n is a, c, g, or t
  misc_feature (1058)..(1058): n is a, c, g, or t
  misc_feature (1076)..(1076): n is a, c, g, or t
  misc_feature (1082)..(1082): n is a, c, g, or t
  misc_feature (1084)..(1084): n is a, c, g, or t
  misc_feature (1093)..(1093): n is a, c, g, or t
  misc_feature (1096)..(1096): n is a, c, g, or t
  misc_feature (1109)..(1109): n is a, c, g, or t
  misc_feature (1111)..(1112): n is a, c, g, or t
  misc_feature (1136)..(1136): n is a, c, g, or t
  misc_feature (1145)..(1145): n is a, c, g, or t
  misc_feature (1148)..(1148): n is a, c, g, or t
  misc_feature (1157)..(1157): n is a, c, g, or t
  misc_feature (1160)..(1161): n is a, c, g, or t
  misc_feature (1170)..(1171): n is a, c, g, or t
  misc_feature (1178)..(1178): n is a, c, g, or t
gagaaattactatgagaggatcgcatcaccatcaccatcacggatcctatttaggtgacactatagaatcgtcgacccacgcgtccgggggcatgcagtttggtcttctgggaactggcttccagctgtttggctatgaggaaaaactgcagtccaatcctctacagcatctctttgaagtttatgtacaagttaataaagaagcagcagatgataaaagtgtagcaaaagcagcacaggagttcttccaacgattggaactgggcgatgtgcaagcactttcactgtggcaaaaatttcgggacttgagcattgaagagtacattcgggtttacaagcgtctgggagtatattttgatgaatattcaggagaatcattttatcgtgaaaaatctcaagaggtcttaaagttgctggagagtaaaggactcctactgaaaacaataaaaggaacggctgtagtagatctctctgggaatggcgacccctcctcaatttgtactgtaatgcgaagtgatgggacttctctctatgcaaccagagatcttgcagctgctatagatcgaatggacaagtataattttgatacaatgatatatgtgacagataaaggacaaaaaaagcattttcagcaagtattccaaatgctgaagatcatgggatatgactgggcagaaaggtgccagcacgtgccctttggagtagtacagggaatgaagactcgaagaggagatgtcactttcctggaagatgttttaaatgagattcaattaaggatgctacagaacatggcttcnattaagacanctaaagaactcaagaacccacaagagactgcagaaaagggtcnggctcgcagcactcattattcaggacttcaaaggtttactcttatctgactacaagttcagctgggatcgtgttttccanagtcncgggggacncaggagtcttcctacagtacacacacncccgcctccncagnttggaaagaaactttnggatgngggtacctgaatgacttcnaccncggcttgnttanaananccccaatctgntttcaattcttcaccacntccccngnttccacaanggngctttttaaatcntnncaggacttccaccccagcaaaccnccgttaccntcnaactttaanccnncttggcccnnggggccna

SEQ ID NO: 242 - DNA, 919 bp, Homo Sapiens
tgagaggatcgcatcaccatcaccatcacggatcctatttaggtgacactatagaatcgtcgacccacgcgtccgcggacgcgtgggcggacgcgtgggctgctggatccgtacatcagcctggcccccggctgcaggagcctattctccgtgttggtgagggtgatcggggacttgatgcagagaatccagagggtaccccagttcccaggcaagctgctcctggtgcgcaagcagttgacgggccaggctcctggggagcagctggaccaccagaccctcctccagggcgtggtggtgctggaggagttctgcaaggagctggctgccattgccttcgtcaagtttcccccacatgatcctcgccagaacgtctccccagccccggaagggcaggtctgagccagcaccagggcggtgggagactcctgtccacacctctgccccagagctgcctcctgcctggcactgccgccacactcccctcctgggatggggcttctgctcccgggctcactcaaggagactgcggcatgttgaccacaccagactgggtttcagggaatgggcatgccaggtgccaaggagccaaacagatggctttccaggcagcaaggtccttggggccttcttggaggagcttgggtgacagccaggtgagcacccagaccccagaccctcatgtgctgtgtgcctggccccttctgtactggccatttgtggccagggccaagcctgtgactcaactccaggggcaagatggggagtgagctgatggctccgagactggtcagagcccaggccagtgagatggggcctggagccttgtctgtgtcacattaagtaccatgggagctgctgagacctgacattttgtcccctgcctacatggcttggcccatggagaaagagcagtgaa

SEQ ID NO: 243 - DNA, 1005 bp, Homo Sapiens
  misc_feature (1)..(2): n is a, c, g, or t
  misc_feature (5)..(12): n is a, c, g, or t
  misc_feature (740)..(740): n is a, c, g, or t
  misc_feature (751)..(751): n is a, c, g, or t
  misc_feature (779)..(779): n is a, c, g, or t
  misc_feature (802)..(802): n is a, c, g, or t
  misc_feature (848)..(848): n is a, c, g, or t
  misc_feature (864)..(864): n is a, c, g, or t
  misc_feature (882)..(882): n is a, c, g, or t
  misc_feature (902)..(902): n is a, c, g, or t
  misc_feature (908)..(908): n is a, c, g, or t
  misc_feature (916)..(916): n is a, c, g, or t
  misc_feature (924)..(924): n is a, c, g, or t
  misc_feature (934)..(934): n is a, c, g, or t
  misc_feature (943)..(943): n is a, c, g, or t
  misc_feature (946)..(946): n is a, c, g, or t
  misc_feature (950)..(950): n is a, c, g, or t
  misc_feature (955)..(955): n is a, c, g, or t
  misc_feature (968)..(968): n is a, c, g, or t
  misc_feature (973)..(973): n is a, c, g, or t
  misc_feature (975)..(975): n is a, c, g, or t
  misc_feature (979)..(979): n is a, c, g, or t
  misc_feature (988)..(988): n is a, c, g, or t
  misc_feature (990)..(990): n is a, c, g, or t
  misc_feature (992)..(992): n is a, c, g, or t
  misc_feature (994)..(994): n is a, c, g, or t
  misc_feature (997)..(997): n is a, c, g, or t
  misc_feature (999)..(999): n is a, c, g, or t
  misc_feature (1004)..(1004): n is a, c, g, or t
nnttnnnnnnnnattagagaaataactatgagaggatcgcatcaccatcaccatcacggatcctatttaggtgacactatagaatcgtcgacccacgcgtccgcaccccgcctgggcatctgcctggactatgagcggggccgggtttccttcctggatgctgtttccttccgtgggctcttggagtgccccctggactgctcagggcctgtgtgccctgccttttgcttcatcgggggtggcgcagtacagctccaggagccagtgggcactaagcctgagaggaaagtcaccattgggggcttcgccaagctggactgagccttccaggcccctcatgcagacctggggtcctcctgggccctggcccccaaacctcttggcacccggttgttaccccctggcagcttctcccccaaactctcctaccatgtggccctgctccttctcccgtgtctgtcttcccacagttttctcttgacccaggggctctcttctgcccacctctctggatggcccccgttctctccattgcttgttagccaggcccccacccccactgagtctgccctatgacctgcctttggcatgttacccaagccatggagagagccccttctccatccctgtcctgtgccccccaggctgattgggagggagggcacctggaacactgggcatgatctccagctctgcccttgccctgccaagctccctgccctgttgatgctgaactacanccttgggacangcaggctttggggctggacgctgtccangcattcctggtgaggggaagggnaccctgtcatcctgctttatttatttggggtcccaacaccccgcanccgcatgccccttaangtccctcttctccctctngcatgctttaacctgttccnaaaccnatgccaangtgccaangtctcccttngggaaccanctnaatntgggngttcccattgggnttggncnaagnaaaggcctntngngnccnantgccna

SEQ ID NO: 244 - DNA, 884 bp, Homo Sapiens
  misc_feature (2)..(3): n is a, c, g, or t
  misc_feature (661)..(661): n is a, c, g, or t
  misc_feature (679)..(679): n is a, c, g, or t
  misc_feature (742)..(742): n is a, c, g, or t
  misc_feature (750)..(750): n is a, c, g, or t
  misc_feature (765)..(765): n is a, c, g, or t
  misc_feature (768)..(768): n is a, c, g, or t
  misc_feature (770)..(770): n is a, c, g, or t
  misc_feature (784)..(784): n is a, c, g, or t
  misc_feature (786)..(786): n is a, c, g, or t
  misc_feature (792)..(792): n is a, c, g, or t
  misc_feature (794)..(794): n is a, c, g, or t
  misc_feature (799)..(799): n is a, c, g, or t
  misc_feature (801)..(801): n is a, c, g, or t
  misc_feature (803)..(803): n is a, c, g, or t
  misc_feature (808)..(808): n is a, c, g, or t
  misc_feature (838)..(838): n is a, c, g, or t
  misc_feature (841)..(841): n is a, c, g, or t
  misc_feature (843)..(843): n is a, c, g, or t
  misc_feature (845)..(845): n is a, c, g, or t
  misc_feature (852)..(854): n is a, c, g, or t
  misc_feature (859)..(860): n is a, c, g, or t
  misc_feature (872)..(872): n is a, c, g, or t
  misc_feature (877)..(877): n is a, c, g, or t
anntagagaaattaactatgagaggatcgcatcaccatcaccatcacggatcctatttaggtgacactatagaatcgtcgacccacgcgtccgactggcacaagcaccaggtcaaagggcatggaggggacgacggagcggccagagccccgggcagcacgtgggccatagcgcgtggctacctgcacaaggagttcctcatggtgctccaccatgccgccatggtgctggtgtgcttcccactctcagtggtgtggcgacaggggaagggagacttctttctgggttgcatgttgatggcagaggtcagcacgcccttcgtctgccttggcaagatcctcatccagtacaagcagcagcacacactgctgcacaaggtgaacggggccctgatgctgctcagcttcctctgctgccgggtgctgctctttccctacctgtactgggcctacgggcgccatgccggcctgcccctgctggccgtgcccctggccatccctgcccacgtcaacctgggcgctgcgctgctcctggcccctcagctctactggttcttcctcatctgccgtggggcctgccgcctcttctggccccgctcccggccgcccccggcctgccaggcccaggactgaggccgggggccgggaccctccccctcccnacacccacccccgtgganacagggctctggggctgatggctggggttgggagccagggtcctcttgcccggacaaccccangactgacnatgaccccgaaaggnaanangccccatctctcgngnactgangnggtgnananagggnaactcttccccctactctgcccccctttcntgnanancctttgnnntggannaagggaaggggncaccncctccca

SEQ ID NO: 245 - DNA, 1179 bp, Homo Sapiens
  misc_feature (921)..(921): n is a, c, g, or t
  misc_feature (946)..(946): n is a, c, g, or t
  misc_feature (949)..(949): n is a, c, g, or t
  misc_feature (951)..(951): n is a, c, g, or t
  misc_feature (966)..(966): n is a, c, g, or t
  misc_feature (988)..(988): n is a, c, g, or t
  misc_feature (1025)..(1025): n is a, c, g, or t
  misc_feature (1028)..(1028): n is a, c, g, or t
  misc_feature (1037)..(1037): n is a, c, g, or t
  misc_feature (1050)..(1050): n is a, c, g, or t
  misc_feature (1063)..(1063): n is a, c, g, or t
  misc_feature (1069)..(1069): n is a, c, g, or t
  misc_feature (1081)..(1081): n is a, c, g, or t
  misc_feature (1088)..(1088): n is a, c, g, or t
  misc_feature (1094)..(1094): n is a, c, g, or t
  misc_feature (1105)..(1105): n is a, c, g, or t
  misc_feature (1107)..(1109): n is a, c, g, or t
  misc_feature (1117)..(1117): n is a, c, g, or t
  misc_feature (1122)..(1122): n is a, c, g, or t
  misc_feature (1129)..(1129): n is a, c, g, or t
  misc_feature (1132)..(1132): n is a, c, g, or t
  misc_feature (1141)..(1141): n is a, c, g, or t
  misc_feature (1145)..(1145): n is a, c, g, or t
  misc_feature (1147)..(1147): n is a, c, g, or t
  misc_feature (1156)..(1156): n is a, c, g, or t
attagagaaattactatgagaggatcgcatcaccatcaccatcacggatcctatttaggtgacactatagaatcgtcgacccacgcgtccgcccagctccttcagcagagcagcagccagaaggatgagatccttcagacggtcaaggaggagcagtcccggctggagcagggcctgagtgagcaccagcgccacctcgacgcagagcggcagcggctgcaggagcagctgaagcagacggaacagaacatttccagccggatccagaagctgctgcaggacaatcagagacaaaagaaaagctccgagattttgaaatcgctggaaaatgaaagaataagaatggaacagttgatgtccataacccaggaggagactgagagcctgcggcgacgtgacgttgcctccgccatgcagcagatgctgactgagagctgtaagaaccggctcatccagatggcctacgaatctcagaggcagaacttggtccagcaggcctgttccagcatggccgaaatggatgaacgattccagcagattctgtcgtggcagcaaatggatcagaacaaagccatcagccagatcctgcaggagagcgcgatgcagaaggctgcgttcgaggcactccaggtgaagaaagacctgatgcatcggcagatcaggagccagattaagttaatagaaactgagttattgcagctgacacagctggagttaaagaggaagtccctggacacagagtcactccaggagatgatctcggagcagcgctgggccctcagctccctgctccagcagctgctcaaagagaagcagcagcgagaggaagagctccgggaaatcctgacggagttagaagccaaaagtgaaaccaggcaggaaaattactggctgattcagtatcaacggcttttgaaccanaagcccttgtccttgaagctgcaanaanangggatggagcgccanctggtggcccctcctggagganctgtcggctgaacactacctgcccatctttgcgcacnccngcctctcantggaactgctganccaaatgagcccnggggancttggccaaggngggcgtntcaaanctggcctgcancnnnaatcctcngaaantccaganctnttggatgcncccngnatccccccnaactgaaacccccatgggggagg

SEQ ID NO: 246 - DNA, 1179 bp, Homo Sapiens
  misc_feature (853)..(853): n is a, c, g, or t
  misc_feature (911)..(911): n is a, c, g, or t
  misc_feature (918)..(918): n is a, c, g, or t
  misc_feature (922)..(922): n is a, c, g, or t
  misc_feature (929)..(929): n is a, c, g, or t
  misc_feature (931)..(931): n is a, c, g, or t
  misc_feature (944)..(944): n is a, c, g, or t
  misc_feature (961)..(961): n is a, c, g, or t
  misc_feature (974)..(974): n is a, c, g, or t
  misc_feature (978)..(978): n is a, c, g, or t
  misc_feature (1002)..(1002): n is a, c, g, or t
  misc_feature (1021)..(1021): n is a, c, g, or t
  misc_feature (1035)..(1035): n is a, c, g, or t
  misc_feature (1043)..(1043): n is a, c, g, or t
  misc_feature (1053)..(1053): n is a, c, g, or t
  misc_feature (1059)..(1059): n is a, c, g, or t
  misc_feature (1062)..(1062): n is a, c, g, or t
  misc_feature (1067)..(1068): n is a, c, g, or t
  misc_feature (1071)..(1071): n is a, c, g, or t
  misc_feature (1073)..(1073): n is a, c, g, or t
  misc_feature (1093)..(1093): n is a, c, g, or t
  misc_feature (1099)..(1101): n is a, c, g, or t
  misc_feature (1103)..(1104): n is a, c, g, or t
  misc_feature (1122)..(1122): n is a, c, g, or t
  misc_feature (1125)..(1125): n is a, c, g, or t
  misc_feature (1129)..(1129): n is a, c, g, or t
  misc_feature (1132)..(1132): n is a, c, g, or t
  misc_feature (1135)..(1135): n is a, c, g, or t
  misc_feature (1149)..(1149): n is a, c, g, or t
  misc_feature (1164)..(1164): n is a, c, g, or t
  misc_feature (1166)..(1166): n is a, c, g, or t
  misc_feature (1177)..(1177): n is a, c, g, or t
gattagagaaattactatgagaggatcgcatcaccatcaccatcacggatcctatttaggtgacactatagaatcgtcgacccacgcgtccgcccacgcgtccgcggagatcagcgacctggaccggcagatcgagcagctgcgtcgctgcgagctcatcaaggagagcgaagtcaaggccctgtgcgctaaggccagagagatcttggtagaggagagcaacgtgcagagggtggactcgccagtcacagtgtgcggcgacatccatggacaattctatgacctcaaagagctgttcagagtaggtggcgacgtccctgagaccaactacctcttcatgggggactttgtggaccgtggcttctatagcgtcgaaacgttcctcctgctgctggcacttaaggttcgctatcctgatcgcatcacactgatccggggcaaccatgagagtcgccagatcacgcaggtctatggcttctacgatgagtgcctgcgcaagtacggctcggtgactgtgtggcgctactgcactgagatctttgactacctcagcctgtcagccatcatcgatggcaagatcttctgcgtgcacgggggcctctccccctccatccagaccctggatcagattcggacaatcgaccgaaagcaagaggtgcctcatgatgggcccatgtgtgacctcctctggtctgacccagaagacaccacaggctggggcgtgagcccccgaggagccggctacctatttggcagtgacgtggtggcccagttcaacgcagccaatgacattgacatgatctgccgtgcccaccaactggtgatggaaggttacaagtggcacttcaatganacggtgctcactgtgtggtcggcacccaactactgctaccgctgtgggaatgtggcanccatctngganctggacnancatctccagaaanatttcatcatctttgangctgctccccaanaaanacgggggcatccccctccaaaaancccgtggccgaatactttntgtgacccccgccnggccctgncccctccaancctttnggncctcnnacnantgggaactctgccatcttcntcaaannnannctggcctggggggggctntcntggnttnctntccccaaaaagggncttcaaggggaaaantncttgggaaagnct

SEQ ID NO: 247 - DNA, 881 bp, Homo Sapiens
ctatgagaggatcgcatcaccatcaccatcacggtcgacccacgcgtccgggcgtggctccctggaacagcctgagcttagctcagcgccggggcttcaccaagacctacactgttggctgtgaggaatgcacagtgtttccctgtttatccatcccctgcaaactgcagagtggcactcattgcttgtggacggaccagctcctccaaggctctgaaaagggcttccagtcccgtcaccttgcctgcctgcctcgggagccagggctgtgcacctggcagtccctgcggtcccagatagcctgaatcctgcccggagtggaagctgaagcctgcacagtgtccaccctgttcccactcccatctttcttccggagcggccgcgatccgcatgcgagctcgattagctgagcttggactcctgttgatagatccagtaatgacctcagaactccatctggatttgttcagaacgctcggttgccgccgggcgttttttattggtgagaatccaagctagcttggcgagattttcaggagctaaggaagctaaaatggagaaaaaaatcactggatataccaccgttgatatatcccaatggcatcgtaaagaacattttgaggcatttcagtcagttgctcaatgtacctataaccagaccgttcagctggatattacggcctttttaaagaccgtaaagaaaaataagcacaagttttatccggcctttattcacattcttgcccgcctgatgaatgctcatccggaatttcgtatggcaatgaaagacggtgagctggtgatatgggatagtgttcacccttgttacaccgttttccatgagcaaactgaaacgttttatcgctctggagtgaatacca

SEQ ID NO: 248 - DNA, 1179 bp, Homo Sapiens
  misc_feature (1)..(1): n is a, c, g, or t
  misc_feature (947)..(947): n is a, c, g, or t
  misc_feature (961)..(962): n is a, c, g, or t
  misc_feature (985)..(985): n is a, c, g, or t
  misc_feature (987)..(987): n is a, c, g, or t
  misc_feature (1002)..(1002): n is a, c, g, or t
  misc_feature (1019)..(1019): n is a, c, g, or t
  misc_feature (1025)..(1025): n is a, c, g, or t
  misc_feature (1027)..(1027): n is a, c, g, or t
  misc_feature (1032)..(1032): n is a, c, g, or t
  misc_feature (1044)..(1044): n is a, c, g, or t
  misc_feature (1085)..(1085): n is a, c, g, or t
  misc_feature (1087)..(1088): n is a, c, g, or t
  misc_feature (1097)..(1097): n is a, c, g, or t
  misc_feature (1103)..(1103): n is a, c, g, or t
  misc_feature (1107)..(1107): n is a, c, g, or t
  misc_feature (1109)..(1109): n is a, c, g, or t
  misc_feature (1112)..(1112): n is a, c, g, or t
  misc_feature (1114)..(1114): n is a, c, g, or t
  misc_feature (1121)..(1121): n is a, c, g, or t
  misc_feature (1139)..(1139): n is a, c, g, or t
  misc_feature (1150)..(1151): n is a, c, g, or t
  misc_feature (1153)..(1153): n is a, c, g, or t
  misc_feature (1163)..(1163): n is a, c, g, or t
  misc_feature (1171)..(1171): n is a, c, g, or t
naattagagaaattactatgagaggatcgcatcaccatcaccatcacggatcctatttaggtgacactatagaatcgtcgacccacgcgtccggtaggaccagggggcagttcaatgccttttcctatcatttccgaggcagacggtctcttgagttcagctaccaggaggacaagccgaccaagaaaacaagaccacggaaaatacccagtgttgggagacagggggaacatctcagcaacagcacctcagccttcagcacacgctcagatgcatctgggacaaatgacttcagagagtttgttctggaaatgcagaagaccatcacagacctcagaacacagataaagaaacttgaatcacggctcagtaccacagagtgcgtggatgccgggggcgaatctcacgccaacaacaccaagtggaaaaaagatgcatgcaccatttgtgaatgcaaagacgggcaggtcacctgcttcgtggaagcttgcccccctgccacctgtgctgtccccgtgaacatcccaggggcctgctgtccagtctgcttacagaagagggcggaggaaaagccctaggctcctgggaggctcctcagagtttgtctgctgtgccatcgtgagatcgggtggccgatggcagggagctgcggactgcagaccaggaaacacccagaactcgtgacatttcatgacaacgtccagctggtgctgttacagaaggcagtgcaggaggcttccaaccagagcatctgcggagaaggaggcacagcaggtgcctgaagggaagcaggcaggagtcctagcttcacgttagacttctcaggtttttatttaattcttttaaaatgaaaaattggtgctactattaaattgcacagttgaatcatttaggcgcctaaattggttttgcctcccaacaccattttctttttaataaagcagganacctctatatgtcnnccttgccttgttcaaatgccagnanccggcaaacctgtcncccgcaggtggggtgantctcgnanctgcnaaggggctcccnaaatcggggttcctccaagctttgttttaaaaaaaaattgngnnttgggaaanggaaanaaancnttngngaaaagngttccaagggaacttgtntgggggggaanngnaaaccccggnccttttcntgggaacc

SEQ ID NO: 249 - DNA, 929 bp, Homo Sapiens
  misc_feature (3)..(4): n is a, c, g, or t
  misc_feature (15)..(15): n is a, c, g, or t
  misc_feature (18)..(19): n is a, c, g, or t
  misc_feature (37)..(38): n is a, c, g, or t
  misc_feature (44)..(44): n is a, c, g, or t
  misc_feature (51)..(51): n is a, c, g, or t
  misc_feature (59)..(59): n is a, c, g, or t
  misc_feature (82)..(82): n is a, c, g, or t
  misc_feature (93)..(93): n is a, c, g, or t
  misc_feature (106)..(106): n is a, c, g, or t
  misc_feature (892)..(892): n is a, c, g, or t
  misc_feature (895)..(895): n is a, c, g, or t
  misc_feature (897)..(897): n is a, c, g, or t
  misc_feature (899)..(899): n is a, c, g, or t
  misc_feature (907)..(907): n is a, c, g, or t
  misc_feature (916)..(920): n is a, c, g, or t
  misc_feature (922)..(929): n is a, c, g, or t
ttnngaggaaaaatnacnnaggaggagggatcggcanncaccantcaccantcacgggnatcctatttttagggtggacacntatagaatcgntcgacccacgcgntccggtgtaaaagaaaatcatagtaactgtaccatattattaacccctaaatcaaactttttttgtcttgtgtatcttgatttttctgtgtgctttatagtgaagcagccgacacgagtcgttgttcataaaacagcttttgaaagttgagagcacacccctggagaaccgactgtgcttgcttacgtttggttcatgacttaaaaatcgagtacaggagttattcctgatgaagctaaagctttgtctctgttggcaccagctaatgcagtggcaggtcttctgcctggtggtggactcctgcctactcctaacccacttacccagattggcgctgttccactggctgctttgggggctcctactcttgatcctgcccttgctgcacttgggcttcctggagcaaacttgaactctcagtctcttgctgcagatcagttgctgaagcttatgagtactgttgatcccaagttgaatcatgtagctgctggtctcgtttcaccaagtctgaaatcggatacctctagtaaagaaatagaggaagctatgaaaagagtacgagaagcacagtccctaatttctgctgctatagaaccagataagaaagaagaaaaaagaaggcattcaagatcaagatcacgttctaggaggaggaggactccctcatcttctagacacaggcggtcaagaagcagatcgagacggcggtcacattctaagtctaggagtcggcgacgatccaaaagcccaaggcggaaaaaaatctcattccaaaaaaagaggtanaangncnagggagcncatccaaannnnnannnnnnnn

SEQ ID NO: 250 - DNA, 1135 bp, Homo Sapiens
  misc_feature (764)..(764): n is a, c, g, or t
  misc_feature (784)..(784): n is a, c, g, or t
  misc_feature (807)..(807): n is a, c, g, or t
  misc_feature (838)..(838): n is a, c, g, or t
  misc_feature (843)..(843): n is a, c, g, or t
  misc_feature (847)..(847): n is a, c, g, or t
  misc_feature (869)..(869): n is a, c, g, or t
  misc_feature (885)..(885): n is a, c, g, or t
  misc_feature (890)..(890): n is a, c, g, or t
  misc_feature (932)..(932): n is a, c, g, or t
  misc_feature (937)..(937): n is a, c, g, or t
  misc_feature (942)..(942): n is a, c, g, or t
  misc_feature (965)..(965): n is a, c, g, or t
  misc_feature (968)..(968): n is a, c, g, or t
  misc_feature (972)..(972): n is a, c, g, or t
  misc_feature (974)..(974): n is a, c, g, or t
  misc_feature (980)..(980): n is a, c, g, or t
  misc_feature (1021)..(1021): n is a, c, g, or t
  misc_feature (1023)..(1023): n is a, c, g, or t
  misc_feature (1027)..(1027): n is a, c, g, or t
  misc_feature (1037)..(1037): n is a, c, g, or t
  misc_feature (1058)..(1058): n is a, c, g, or t
  misc_feature (1066)..(1066): n is a, c, g, or t
  misc_feature (1071)..(1071): n is a, c, g, or t
  misc_feature (1093)..(1093): n is a, c, g, or t
  misc_feature (1112)..(1112): n is a, c, g, or t
  misc_feature (1116)..(1116): n is a, c, g, or t
  misc_feature (1118)..(1118): n is a, c, g, or t
  misc_feature (1120)..(1121): n is a, c, g, or t
  misc_feature (1125)..(1126): n is a, c, g, or t
  misc_feature (1129)..(1129): n is a, c, g, or t
  misc_feature (1133)..(1133): n is a, c, g, or t
agaaattactatgagaggatcgcatcaccatcaccatcacggatcctatttaggtgacactatagaatcgtcgacccacgcgtccggccacattaaccggcaggatgtcggaggtgcggctgccaccgctacgcgccctggacgactttgttctggggtcggcgcgtctggcggctccggatccatgcgacccgcagcgatggtgccaccgcgtcatcaacaacctcctctactaccaaaccaactaccttctctgcttcggcatcggcctcgctctcgccgggtacgtgcggccacttcatacgctcctgagcgcgctggtagtggcggtggccctcggcgtgctggtgtgggcagctgagacccgcgcagctgtgcgccgctgccgccgcagccaccctgcagcctgcctggccgcagtgcttgccgtcggcctcctggtgctctgggtcgcgggcggcgcttgcaccttcctgttcagcatcgccgggccggtgcttctgatcctggtgcacgcctcgttgcgcctgcgcaaccttaagaacaagattgagaacaagatcgagagcattggtctcaagcggacgccaatgggcctgctactagaggcactgggacaagagcaggaggctggatcctaggcccctgggatctgtacccaggacctggagaataccaccccacccccagcccataattgggacccagagccctttcccagcacttaaaacaggagcctagagccccctgcccaaacaaaacangacatctgtgaccgccctanccccacgccagccccaaactaanatatccctcacacccagcccccattacctanggacnagantcttccccagccttgaacctangacaaaaaccacctanatcanccccaaaactggggcttcaggccaaaacatcatggccaattnaaatngtganccaaaaaactcccatcaaccttntcnatgntnatcccnaaatggggcctggaacaaggactctcaaatcttgaacctgnanaaancttttcaaanccacctactttcaaccaagtnaaaaattnccaantttgaatcaaaaccaatgttcnatgccctgggggaaggaancggnancnnaaanntgnaccngg

SEQ ID NO: 251 - DNA, 1141 bp, Homo Sapiens
  misc_feature (832)..(832): n is a, c, g, or t
  misc_feature (945)..(945): n is a, c, g, or t
  misc_feature (951)..(951): n is a, c, g, or t
  misc_feature (955)..(955): n is a, c, g, or t
  misc_feature (979)..(979): n is a, c, g, or t
  misc_feature (996)..(996): n is a, c, g, or t
  misc_feature (1033)..(1033): n is a, c, g, or t
  misc_feature (1035)..(1035): n is a, c, g, or t
  misc_feature (1038)..(1038): n is a, c, g, or t
  misc_feature (1048)..(1048): n is a, c, g, or t
  misc_feature (1050)..(1050): n is a, c, g, or t
  misc_feature (1058)..(1058): n is a, c, g, or t
  misc_feature (1063)..(1063): n is a, c, g, or t
  misc_feature (1070)..(1070): n is a, c, g, or t
  misc_feature (1078)..(1078): n is a, c, g, or t
  misc_feature (1089)..(1089): n is a, c, g, or t
  misc_feature (1091)..(1091): n is a, c, g, or t
  misc_feature (1095)..(1095): n is a, c, g, or t
  misc_feature (1098)..(1098): n is a, c, g, or t
  misc_feature (1100)..(1100): n is a, c, g, or t
  misc_feature (1103)..(1103): n is a, c, g, or t
  misc_feature (1105)..(1105): n is a, c, g, or t
  misc_feature (1109)..(1109): n is a, c, g, or t
  misc_feature (1119)..(1119): n is a, c, g, or t
  misc_feature (1128)..(1128): n is a, c, g, or t
  misc_feature (1131)..(1131): n is a, c, g, or t
  misc_feature (1137)..(1137): n is a, c, g, or t
tagagaaattactatgagaggatcgcatcaccatcaccatcacggatcctatttaggtgacactatagaatcgtcgacccacgcgtccggtggaaaagcctttgggtccaaatccactcttgttcgacaccagagaactcacacaggagaaaagccatatgagtgtggtgaatgtgggaaattattcagacaaagcttcagccttgttgtacaccagagaattcacactacagcaaggccttatgagtgtggccagtgtgggaaatcatttagcctaaagtgtggcctcattcagcaccagttaattcacagtggagctaggccctttgagtgtgatgagtgcggaaaatcctttagccaaagaaccaccctcaataaacaccacaaagttcacactgcagaaaggccttatgtatgtggggaatgtgggaaagcttttatgttcaaatctaaacttgttaggcaccagagaactcacactggagaaaggccttttgagtgcagtgaatgtgggaaattttttagacaaagctataccctcgttgaacaccagaaaattcacactggattaaggccttacgactgtggacagtgcgggaaatcctttatccaaaagtctagcctcattcaacaccaagtggttcacacaggagaaaggccatatgagtgtggcaaatgtgggaagtcctttacacaacactctggcctcattctccaccgaaaatctcacactgtggagaggcctcgtgacagcagcaaatgtggaaaaccctacagcccaagatctaacattgtttaactcttgaaactccaaacctgagaaaagccttanacctgcagggaatgtgccatgtcttcttcagtgttatggctatagagagcctttgtgaaggagccgtctgcctaaagttaaacctcatacttctagacctcccgatgggtcanactccnttanttccaggcatatgtgtctggcagnacccccttgcatgttcnaaactgctggaggcctttgccaaattaaatcattaancnccntgcatactangngaggcaanacccngggttcncccacccntggaggaaatncntgancancngancnttangggaattccntccctttcnganggatangcaa

SEQ ID NO: 252 - DNA, 1179 bp, Homo Sapiens
  misc_feature (856)..(856): n is a, c, g, or t
  misc_feature (859)..(859): n is a, c, g, or t
  misc_feature (887)..(887): n is a, c, g, or t
  misc_feature (894)..(894): n is a, c, g, or t
  misc_feature (927)..(927): n is a, c, g, or t
  misc_feature (932)..(932): n is a, c, g, or t
  misc_feature (940)..(940): n is a, c, g, or t
  misc_feature (959)..(959): n is a, c, g, or t
  misc_feature (970)..(970): n is a, c, g, or t
  misc_feature (973)..(973): n is a, c, g, or t
  misc_feature (996)..(996): n is a, c, g, or t
  misc_feature (1011)..(1011): n is a, c, g, or t
  misc_feature (1020)..(1020): n is a, c, g, or t
  misc_feature (1024)..(1024): n is a, c, g, or t
  misc_feature (1031)..(1031): n is a, c, g, or t
  misc_feature (1035)..(1035): n is a, c, g, or t
  misc_feature (1043)..(1043): n is a, c, g, or t
  misc_feature (1052)..(1052): n is a, c, g, or t
  misc_feature (1055)..(1055): n is a, c, g, or t
  misc_feature (1059)..(1059): n is a, c, g, or t
  misc_feature (1062)..(1062): n is a, c, g, or t
  misc_feature (1065)..(1065): n is a, c, g, or t
  misc_feature (1070)..(1070): n is a, c, g, or t
  misc_feature (1079)..(1079): n is a, c, g, or t
  misc_feature (1085)..(1085): n is a, c, g, or t
  misc_feature (1088)..(1088): n is a, c, g, or t
  misc_feature (1093)..(1093): n is a, c, g, or t
  misc_feature (1098)..(1098): n is a, c, g, or t
  misc_feature (1100)..(1100): n is a, c, g, or t
  misc_feature (1111)..(1111): n is a, c, g, or t
  misc_feature (1135)..(1135): n is a, c, g, or t
  misc_feature (1137)..(1138): n is a, c, g, or t
  misc_feature (1141)..(1141): n is a, c, g, or t
  misc_feature (1144)..(1144): n is a, c, g, or t
  misc_feature (1153)..(1153): n is a, c, g, or t
  misc_feature (1158)..(1158): n is a, c, g, or t
  misc_feature (1172)..(1173): n is a, c, g, or t
  misc_feature (1179)..(1179): n is a, c, g, or t
tagagaaattactatgagaggatcgcatcaccatcaccatcacggatcctatttaggtgacactatagaatcgtcgacccacgcgtccggcattattggcgtcaaccgcactcggcaggtggacaaccacgtcattggagacccgggtagtgttgtctacgacagcagctttgacctcttcaaggaaattgggcacctgtgtcacctctgcaaggccatcgcagccaactccgagctggtgaagccgggtggggcccagtgcctgccttcaggctacagcatctcctccttcctgcagatgttgcaccctgagtgcaaggagctgcccgagcccaacctgctcccggggcagctgtcccacggggcagtgggcgtcagggagggccgcgtgcagtggatctccatggctttcgagtcgaccacgtacaagggcaaatcctccttccagacctactcggactacctgcgctgggagagcttcctccagcagcagctgcaggccttgcccgagggctcagtcctgcgccggggcttccagacctgcgagcactggaagcagatattcatggaaatcgtaggggtgcagagcgccctgtgcggcctggtgctatccctgctcatctgcgtggccgcggtggccgtgttcaccacccacatcctgctcctgctgcccgtgctcctcagcatcttgggcatcgtgtgcctggtggtgaccatcatgtactggagcggctgggagatgggggctgtggaagccatctccctgtccatcctcgttggctcctccgtggattactgcgtccacctggtcgagggctacctgctggctggaaagaacctgccccccaccaggccnagnacgcccgaacgcagcgccagtggcgtangctggangccgtgcggcacgtgggcgtggccatcgtctcnagtgnccctcacnacggtcatcgccaaagtgnccccttttttntgnatcatcgccccatttgccaagtncggcaaaattggggnactcaaaangggnggggtcnatcntttaaaancttaacgtnaanaccnccntgntgggnattatgggncccaanttntttcnttcgnanccggaatttcntttctcaaagcccttgggtgcccngnnttntgnaaaggcccntgggnctggtgcctgcctnnggcccn

SEQ ID NO: 253 - DNA, 801 bp, Homo Sapiens
  misc_feature (3)..(3): n is a, c, g, or t
  misc_feature (72)..(72): n is a, c, g, or t
  misc_feature (331)..(331): n is a, c, g, or t
  misc_feature (366)..(366): n is a, c, g, or t
  misc_feature (432)..(432): n is a, c, g, or t
  misc_feature (510)..(510): n is a, c, g, or t
  misc_feature (513)..(513): n is a, c, g, or t
  misc_feature (532)..(532): n is a, c, g, or t
  misc_feature (554)..(554): n is a, c, g, or t
  misc_feature (596)..(596): n is a, c, g, or t
  misc_feature (601)..(601): n is a, c, g, or t
  misc_feature (619)..(619): n is a, c, g, or t
  misc_feature (634)..(634): n is a, c, g, or t
  misc_feature (662)..(662): n is a, c, g, or t
  misc_feature (685)..(686): n is a, c, g, or t
  misc_feature (692)..(693): n is a, c, g, or t
  misc_feature (695)..(695): n is a, c, g, or t
  misc_feature (698)..(698): n is a, c, g, or t
  misc_feature (703)..(703): n is a, c, g, or t
  misc_feature (718)..(718): n is a, c, g, or t
  misc_feature (729)..(729): n is a, c, g, or t
  misc_feature (739)..(739): n is a, c, g, or t
  misc_feature (756)..(756): n is a, c, g, or t
  misc_feature (767)..(767): n is a, c, g, or t
  misc_feature (778)..(778): n is a, c, g, or t
  misc_feature (793)..(794): n is a, c, g, or t
  misc_feature (796)..(797): n is a, c, g, or t
  misc_feature (800)..(800): n is a, c, g, or t
aantagagaaattactatgagaggatcgcatcaccatcaccatcacgggatcctatttaggtgacactatanaatcgtcgacccacgcgtccgaggacaggctgggggcggcgaccgcgaggggccgcgcgcggagggcgcctggtgcagcatgggcggcccgcgggcttgggcgctgctctgcctcgggctcctgctcccgggaggcggcgctgcgtggagcatcggggcagctccgttctccggacgcaggaactggtgctcctatgtggtgacccgcaccatctcatgccatgtgcagaatggcacctaccttcagcgagtgctgcanaactgcccctggcccatgagctgtccggggagcanctacagaactgtggtgagacccacatacaaggtgatgtacaagatagtgaccgcccgtgagtggangtgctgccctgggcactcaggagtgagctgcgaggaagttgcagcttcctctgcctccttggagcccatgtggtcggncantaccatgcagcggatggcncttcggcccacagccttctcangttgtctcaactgcagcaaagtgtcatagctgacaaagcggntgaangtgctggaggccaaaatnaccatgctgactgtnatagagcatccagtacctccaacaccanctacccctgaagaccctgccccnntctggnntnccncttcntgcccagggcaaccncggagatggangccctccaanaacaaatcggtgcttgngaaacttcccnggcccaaccgntccctagggaagatnntnnacna

SEQ ID NO: 254 - DNA, 1179 bp, Homo Sapiens
  misc_feature (1)..(1): n is a, c, g, or t
  misc_feature (3)..(3): n is a, c, g, or t
  misc_feature (893)..(893): n is a, c, g, or t
  misc_feature (943)..(943): n is a, c, g, or t
  misc_feature (947)..(947): n is a, c, g, or t
  misc_feature (958)..(958): n is a, c, g, or t
  misc_feature (962)..(962): n is a, c, g, or t
  misc_feature (966)..(966): n is a, c, g, or t
  misc_feature (976)..(976): n is a, c, g, or t
  misc_feature (999)..(999): n is a, c, g, or t
  misc_feature (1013)..(1013): n is a, c, g, or t
  misc_feature (1020)..(1020): n is a, c, g, or t
  misc_feature (1022)..(1022): n is a, c, g, or t
  misc_feature (1030)..(1030): n is a, c, g, or t
  misc_feature (1035)..(1035): n is a, c, g, or t
  misc_feature (1042)..(1042): n is a, c, g, or t
  misc_feature (1048)..(1048): n is a, c, g, or t
  misc_feature (1058)..(1058): n is a, c, g, or t
  misc_feature (1074)..(1074): n is a, c, g, or t
  misc_feature (1087)..(1087): n is a, c, g, or t
  misc_feature (1091)..(1091): n is a, c, g, or t
  misc_feature (1100)..(1100): n is a, c, g, or t
  misc_feature (1110)..(1110): n is a, c, g, or t
  misc_feature (1121)..(1121): n is a, c, g, or t
  misc_feature (1129)..(1129): n is a, c, g, or t
  misc_feature (1132)..(1132): n is a, c, g, or t
  misc_feature (1137)..(1138): n is a, c, g, or t
  misc_feature (1146)..(1146): n is a, c, g, or t
  misc_feature (1151)..(1151): n is a, c, g, or t
  misc_feature (1167)..(1167): n is a, c, g, or t
  misc_feature (1173)..(1173): n is a, c, g, or t
nanatagagaaattactatgagaggatcgcatcaccatcaccatcacggatcctatttaggtgacactatagaatcgtcgacccacgcgtccgggctatttggcaagaagcagatgcgcattttgatggttggattggatgctgctggcaagacaaccattctgtataaactgaagttaggggagatagtcaccaccattcctaccattggttttaatgtggaaacagtagaatataagaacatttgtttcacagtatgggatgttggtggtcaagatagaattaggcctctctggaagcattacttccagaatacccagggtcttatttttgtggtagatagcaacgatcgtgaaagaattcaggaagtagcagatgagctgcagaaaatgcttctggtagatgaattgagagatgcagtgctgctactttttgcaaacaaacaggatttgccaaatgctatggccatcagtgaaatgacagataaactagggcttcagtctcttcgtaacagaacatggtatgttcaagccacttgtgcaacacaaggaactggtctgtatgaaggacttgactggctgtcaaatgagctttcaaaacgttaaatgaaattggatatctaaccaaggacatgtttgataaaattggtctaggcttgttacaacaaaattagtttgtatcttggttattaaacagtatctgggactggtttgggcagaatattaaacttattttgttgccaattattgtttaccgagtataatgttgctatttagcaatgtgcttggttttaaaagaaattctccttgggaaaaaagtatcctcttttaattttacttcccataagcgtaaatgcctggacatagctcttgtgcaacctttaaataaattgntttgagtgttttttgagccccagacaaataatgttttaaaggtatccccntgcnactttactganaccnttancattcctganacagtttgccaaattaaaaatgnaccatccattgganttattcncnccctgccnaaaanattttcnaaaacngcttggaccnccccaaaaaaaatccnaaaacctactccncccncttgccctnaggaaatttncccccaaattnaccccggnccnaatcnnccaaactnaaccntgggggggttttgganttaaanccaata

SEQ ID NO: 255 - DNA, 1140 bp, Homo Sapiens
  misc_feature (3)..(3): n is a, c, g, or t
  misc_feature (951)..(951): n is a, c, g, or t
  misc_feature (956)..(956): n is a, c, g, or t
  misc_feature (960)..(960): n is a, c, g, or t
  misc_feature (971)..(971): n is a, c, g, or t
  misc_feature (975)..(975): n is a, c, g, or t
  misc_feature (979)..(979): n is a, c, g, or t
  misc_feature (1007)..(1007): n is a, c, g, or t
  misc_feature (1026)..(1026): n is a, c, g, or t
  misc_feature (1028)..(1028): n is a, c, g, or t
  misc_feature (1052)..(1052): n is a, c, g, or t
  misc_feature (1054)..(1054): n is a, c, g, or t
  misc_feature (1071)..(1071): n is a, c, g, or t
  misc_feature (1089)..(1089): n is a, c, g, or t
  misc_feature (1091)..(1091): n is a, c, g, or t
  misc_feature (1101)..(1101): n is a, c, g, or t
  misc_feature (1103)..(1103): n is a, c, g, or t
  misc_feature (1112)..(1112): n is a, c, g, or t
  misc_feature (1114)..(1114): n is a, c, g, or t
  misc_feature (1117)..(1117): n is a, c, g, or t
  misc_feature (1121)..(1121): n is a, c, g, or t
  misc_feature (1124)..(1125): n is a, c, g, or t
  misc_feature (1136)..(1136): n is a, c, g, or t
  misc_feature (1138)..(1138): n is a, c, g, or t
  misc_feature (1140)..(1140): n is a, c, g, or t
aanagagaaattactatgagaggatcgcatcaccatcaccatcacggatcctatttaggtgacactatagaatcgtcgacccacgcgtccgctgtggtagaggaaacaagacagttctgtctgcagaagcccattatggctgtaactggagatgacacagctgccactggtgacatgccaacttaccagatccgagctcctactgctgctttgccacagggagtggtgatggctgcatcgcccggaagtttgcacagtccccagcagctggcagaagaagcaacacgcaaacgagagctgaggctaatgaaaaacagggaagctgcccgggagtgtcgcaggaagaagaaagaatatgtcaaatgtcttgaaaatcgtgtggctgtgcttgaaaaccaaaacaagactctcattgaggaactcaaggccctcaaagatctttattgccataaagtagagtaactgtctttgacttggaccttgtttactctaatcaaggcaggagatgcagcagtcctacttattgccatgtggacttgtgggaaggacacgtgtgacccttaagaatccagtttggattagtgtttgaaattgaattgggaatgttgttccaggatgtggaatgcagccgtgatcacacttaccgagcttactttgatctgtttgtcaatagcatgcaaaaaatgctttgtttgccctttgcttctgctttttttcagggaagctgccaaagaatgtcgacgtcgaaagaaagaatatgtaaaatgtctggagagccgagttgcagtgctggaagtccagaacaagaagcttatagaggaacttgaaaccttgaaagacatttgttctcccaaaacagattactagaaatatttaactatgaactgaaggcagcatgtatagttgcttttgaaggaatacaatatatagctggcaagaatgggggcttcntttcnttgnatcattcatcntctncttnaatcacttaacattcctaaaatgcttcnctgtacgtagttaagtcgnanctataacttccaattttttaaaananacaactgtaaaaaatgngggtattcttaaatgcanantttgtaaggntngttccatgncnaanactngcnnctcccattctntngn

SEQ ID NO: 256 - DNA, 1044 bp, Homo Sapiens
  misc_feature (2)..(2): n is a, c, g, or t
  misc_feature (9)..(9): n is a, c, g, or t
  misc_feature (685)..(685): n is a, c, g, or t
  misc_feature (763)..(763): n is a, c, g, or t
  misc_feature (788)..(788): n is a, c, g, or t
  misc_feature (868)..(868): n is a, c, g, or t
  misc_feature (874)..(874): n is a, c, g, or t
  misc_feature (892)..(892): n is a, c, g, or t
  misc_feature (902)..(902): n is a, c, g, or t
  misc_feature (920)..(920): n is a, c, g, or t
  misc_feature (925)..(925): n is a, c, g, or t
  misc_feature (945)..(945): n is a, c, g, or t
  misc_feature (951)..(951): n is a, c, g, or t
  misc_feature (958)..(958): n is a, c, g, or t
  misc_feature (962)..(963): n is a, c, g, or t
  misc_feature (967)..(967): n is a, c, g, or t
  misc_feature (975)..(975): n is a, c, g, or t
  misc_feature (978)..(978): n is a, c, g, or t
  misc_feature (986)..(987): n is a, c, g, or t
  misc_feature (1005)..(1005): n is a, c, g, or t
  misc_feature (1023)..(1023): n is a, c, g, or t
  misc_feature (1029)..(1029): n is a, c, g, or t
  misc_feature (1035)..(1037): n is a, c, g, or t
  misc_feature (1041)..(1041): n is a, c, g, or t
antagaganaattactatgagaggatcgcatcaccatcaccatcacggatcctatttaggtgacactatagaatcgtcgacccacgcgtccgggcgcggctggggacgaggaggagggggcctgttattttgcaggctcgcgggggaggccccccggccggcctgcctccgcttccccccgctgggccctccgaggccccggccggccaggcggccaccccggctgtgatttggggacgctgagggagggggcttggggtgctgggcgccggatactgttgattcgggcccgcgtagggtttcatcggacaatcaccggcgccccctgctctcccggccccggcgcccggacctgggggttcgcaaggctgcgcccgctcgttggatgacgggcgtttgggggtcctaagcaagagtgagccatggagctacgtgtggggaacaagtaccgcctgggacggaagatcgggagcgggtccttcggagatatctacctgggtgccaacatcgcctctggtgaggaagtcgccatcaagctggagtgtgtgaagacaaagcacccccagctgcacatcgagagcaagttctacaagatgatgcagggtggcgtggggatcccgtccatcaagtggtgcggagctgagggcgactacaacgtgatggtcatggagctgctggggcctancctcgaggacctgttcaacttctgttcccgcaaattcagcctcaagacggtgctgctcttggccgaccagatgatcanccgcatcgagtatatccactccaanaacttcatccaccgggacgtcaagccccgacaacttcctcatggggctggggaaaaagggcaacctggtctacatcatcnacttcngcctggccaaaaaatacnggaacgcccncaccaccaacacattccntaacnggaaaaaaaaaaactgaacngggaanggcccgnttanncttncatcaaanacncacttggnnatttaaacaaaacccttnaaaataaacctgaaaaanctgggncataannncttnatt

SEQ ID NO: 257 - DNA, 1047 bp, Homo Sapiens
  misc_feature (2)..(2): n is a, c, g, or t
  misc_feature (843)..(843): n is a, c, g, or t
  misc_feature (866)..(866): n is a, c, g, or t
  misc_feature (869)..(869): n is a, c, g, or t
  misc_feature (874)..(874): n is a, c, g, or t
  misc_feature (898)..(898): n is a, c, g, or t
  misc_feature (908)..(908): n is a, c, g, or t
  misc_feature (941)..(941): n is a, c, g, or t
  misc_feature (957)..(957): n is a, c, g, or t
  misc_feature (967)..(967): n is a, c, g, or t
  misc_feature (983)..(983): n is a, c, g, or t
  misc_feature (992)..(992): n is a, c, g, or t
  misc_feature (1013)..(1013): n is a, c, g, or t
  misc_feature (1022)..(1022): n is a, c, g, or t
  misc_feature (1044)..(1044): n is a, c, g, or t
antagagaaattaactatgagaggatcgcatcaccatcaccatcacggatcctatttaggtgacactatagaatcgtcgacccacgcgtccggcttcctggatgacaaccaaatcatcaccagctctggggataccacctgtgccctgtgggacattgagacaggccagcagacagtgggttttgctggacacagtggggatgtgatgtccctgtccctggcccccgatggccgcacgtttgtgtcaggcgcctgtgatgcctctatcaagctgtgggacgtgcgggattccatgtgccgacagaccttcatcggccatgaatccgacatcaatgcagtggctttcttccccaacggctacgccttcaccaccggctctgacgacgccacgtgccgcctcttcgacctgcgggccgatcaggagctcctcatgtactcccatgacaacatcatctgtggcatcacctctgttgccttctcgcgcagcggacggctgctgctcgctggctacgacgacttcaactgcaacatctgggatgccatgaagggcgaccgtgcaggagtcctcgctggccacgacaaccgcgtgagctgcctcggggtcaccgacgatggcatggctgtggccacgggctcctgggactccttcctcaagatctggaactaatggccccacccccactgggcccaggccaggaggggccctgcccatgcccacactacaggccagggctgcggggctggcgcaatcccagcccccttccccgggccacggggccttgggtccctgccctcccacccaggtttggttcctcccggggcccccactgtggagataaaaangggaatggaatgggggaaaaagnagnaacangaaggcccctcatccttctgctgncctggggttnggggcctcacccctctggaagggccggaagcangaggtggaaaaccccnaggggctggntttttttaaaactggntttaatttnaatttttaataaaattttcantttttccanaaaaggaaccaattccaacctntgt

SEQ ID NO: 258 - DNA, 1179 bp, Homo Sapiens
  misc_feature (753)..(753): n is a, c, g, or t
  misc_feature (858)..(858): n is a, c, g, or t
  misc_feature (876)..(876): n is a, c, g, or t
  misc_feature (898)..(898): n is a, c, g, or t
  misc_feature (905)..(905): n is a, c, g, or t
  misc_feature (925)..(925): n is a, c, g, or t
  misc_feature (936)..(936): n is a, c, g, or t
  misc_feature (946)..(946): n is a, c, g, or t
  misc_feature (949)..(949): n is a, c, g, or t
  misc_feature (966)..(966): n is a, c, g, or t
  misc_feature (1001)..(1001): n is a, c, g, or t
  misc_feature (1003)..(1003): n is a, c, g, or t
  misc_feature (1011)..(1011): n is a, c, g, or t
  misc_feature (1024)..(1024): n is a, c, g, or t
  misc_feature (1027)..(1028): n is a, c, g, or t
  misc_feature (1033)..(1033): n is a, c, g, or t
  misc_feature (1037)..(1037): n is a, c, g, or t
  misc_feature (1063)..(1063): n is a, c, g, or t
  misc_feature (1065)..(1065): n is a, c, g, or t
  misc_feature (1080)..(1080): n is a, c, g, or t
  misc_feature (1084)..(1084): n is a, c, g, or t
  misc_feature (1096)..(1096): n is a, c, g, or t
  misc_feature (1105)..(1105): n is a, c, g, or t
  misc_feature (1107)..(1107): n is a, c, g, or t
  misc_feature (1117)..(1117): n is a, c, g, or t
  misc_feature (1124)..(1124): n is a, c, g, or t
  misc_feature (1127)..(1127): n is a, c, g, or t
  misc_feature (1130)..(1130): n is a, c, g, or t
  misc_feature (1132)..(1132): n is a, c, g, or t
  misc_feature (1142)..(1142): n is a, c, g, or t
  misc_feature (1146)..(1146): n is a, c, g, or t
  misc_feature (1151)..(1151): n is a, c, g, or t
  misc_feature (1173)..(1173): n is a, c, g, or t
  misc_feature (1175)..(1178): n is a, c, g, or t
gaatagagagaattactatgagaggatcgcatcaccatcaccatcacggatcctatttaggtgacactatagaatcgtcgacccacgcgtccgaagaaatcctgacccgcctgggagtggagccgtccgatgatgactgtgtctcagtccagcacgtttgcaccattgtctcatttcgctcagccaacttggtggctgccacactgggcgccatcttgaaccgcctgcgtgataacaagggcacacccaggctgcggaccacggttggtgtcgacggatctctttacaagacgcacccacagtattcccggcgtttccacaagactctaaggcgcttggtgccagactccgatgtgcgcttcctcctctcggagagtggcagcggcaagggggctgccatggtgacggcggtggcctaccgcttggccgagcagcaccggcagatagaggagaccctggctcatttccacctcaccaaagacatgctgctggaggtgaagaagaggatgcgggccgagatggagctggggctgaggaagcagacgcacaacaatgccgtggttaagatgctgccctccttcgtccggagaactcccgacgggaccgagaatggtgacttcttggccctggatcttggaggaaccaatttccgtgtgctgctggtgaaaatccgtagtgggaaaaagagaacggtggaaatgcacaacaagatctacgccattcctattgaaatcatgcagggcactggggaanagctgtttgatcacattgtctcctgcatctctgacttcttggactacatggggatcaaaggccccaggatgcctctggggcttcacgttctcatttccctgccancaaaacgaagtctggacncgggaatcttgatcacgtgaanaaagggnttttaaagcaacaaaactgncgttgggcccncgaatgtaantcnccttaattaaagggatnccaataaaaaaaggaaaagagaaatttgaacctgnangtggtggnttgtggtccaacnaannaaggnggcnacaatgataacctggggtttaaaagnancccccctggtaagtngganctcatttttggnaccgggcancnattgcctgtntaattgnaanaananaaaaacgtgnaaanggggnaagggggacaagggcaaaattncnnnna

SEQ ID NO: 259 - DNA, 1001 bp, Homo Sapiens
  misc_feature (1)..(2): n is a, c, g, or t
  misc_feature (4)..(12): n is a, c, g, or t
  misc_feature (705)..(705): n is a, c, g, or t
  misc_feature (721)..(721): n is a, c, g, or t
  misc_feature (773)..(773): n is a, c, g, or t
  misc_feature (809)..(809): n is a, c, g, or t
  misc_feature (811)..(811): n is a, c, g, or t
  misc_feature (815)..(815): n is a, c, g, or t
  misc_feature (820)..(820): n is a, c, g, or t
  misc_feature (823)..(823): n is a, c, g, or t
  misc_feature (860)..(860): n is a, c, g, or t
  misc_feature (864)..(864): n is a, c, g, or t
  misc_feature (903)..(903): n is a, c, g, or t
  misc_feature (905)..(905): n is a, c, g, or t
  misc_feature (913)..(914): n is a, c, g, or t
  misc_feature (924)..(924): n is a, c, g, or t
  misc_feature (928)..(928): n is a, c, g, or t
  misc_feature (932)..(932): n is a, c, g, or t
  misc_feature (938)..(938): n is a, c, g, or t
  misc_feature (942)..(942): n is a, c, g, or t
  misc_feature (965)..(966): n is a, c, g, or t
  misc_feature (970)..(970): n is a, c, g, or t
  misc_feature (977)..(977): n is a, c, g, or t
  misc_feature (979)..(979): n is a, c, g, or t
  misc_feature (984)..(984): n is a, c, g, or t
  misc_feature (986)..(986): n is a, c, g, or t
  misc_feature (995)..(996): n is a, c, g, or t
nnannnnnnnnnattagagaaaattactatgagaggatcgcatcaccattcaccattcacggatcctatttaggtgacacttattagaatcgtcgacccacgcgtccgcccacgcgtccgggcgtgagctggcgccgaaatgggagaaagcagcgagtgagaggggaaggggcgccaggcgagcacccgggagccagcgggacctgggcaggggcgcccggagcaggcgcgcatggcgggccccgcgcggggatccggctggaagagagcgtagcacggctcgcacgagtgagtggacgtgggaggcgcgcatctgcgggggaatcgccccttgcccgcctccggcgccgcccgctgagccctgttttccgcaggtccggggccgatgtaccaggtgagcggccagcgcccctctggctgcgacgcgccctatggagcccccagcgcagccccgggcccagaccctatccctccttcctgggctggaggtagtaacaggatccactcaccctgcggaggcagcaccagaggagggctccctggaggaggcggcaacccccatgccccaaggcaatggccctggcatcccccagggcctggacagcactgacctcgacgtccccacagaagctgtgacatgccagcctcaggggaaccccttgggctgcaccccacttctgccgaatgactctggccacccctcanagctgggcggcaccanacgggcggggaatggtgccctgggtggccccaaggcccaccggaagttgcanacacacccatctctcgccagccagggcagcaagaanantaanagcancancaaatccaccacctcccaaatccccctccaggcacangaanactgctgtgtccactgcatcctgtcctgcctgttctgcnanttcctganncttttgcaanatcnttcntggaantgcncccacctgtggcttccttgcaanntcgnaagaatncntgccntntgctgcttnntgctg

SEQ ID NO: 260 - DNA, 558 bp, Homo Sapiens
  misc_feature (1)..(1): n is a, c, g, or t
  misc_feature (513)..(514): n is a, c, g, or t
  misc_feature (517)..(517): n is a, c, g, or t
  misc_feature (523)..(523): n is a, c, g, or t
  misc_feature (529)..(529): n is a, c, g, or t
  misc_feature (540)..(542): n is a, c, g, or t
  misc_feature (544)..(544): n is a, c, g, or t
  misc_feature (549)..(550): n is a, c, g, or t
  misc_feature (552)..(553): n is a, c, g, or t
  misc_feature (555)..(558): n is a, c, g, or t
naattagagaaattactatgagaggatcgcatcaccatcaccatcacggatcctatttaggtgacactatagaatcgtcgacccacgcgtccgccaagatgccgcccaaaggaaaaagtggttctggaaaagcggggaaagggggagcagcctctgggagtgacagtgctgacaagaaggctcaaggtcccaaaggtggtggcaatgcagtaaaggtcagacacattctatgtgaaaaacatggcaaaatcatggaagccatggaaaagttaaagtctgggatgagattcaatgaagtggccgcacagtatagtgaagataaagccaggcaagggggtgacttgggttggatgaccagagggtccatggtgggaccatttcaagaagcagcatttgccttgcctgtaagtgggatggataagcctgtgtttacagacccaccggttaagacaaaatttggatatcatattattatggtcgaaggaagaaaataaaatcatatgaaagactgannaanaaaaanaaaaanaaaaaaaaaannnanaaaannannannnn

SEQ ID NO: 261 - DNA, 1217 bp, Homo Sapiens
  misc_feature (7)..(7): n is a, c, g, or t
  misc_feature (778)..(778): n is a, c, g, or t
  misc_feature (831)..(831): n is a, c, g, or t
  misc_feature (833)..(833): n is a, c, g, or t
  misc_feature (860)..(860): n is a, c, g, or t
  misc_feature (869)..(869): n is a, c, g, or t
  misc_feature (879)..(879): n is a, c, g, or t
  misc_feature (902)..(902): n is a, c, g, or t
  misc_feature (905)..(905): n is a, c, g, or t
  misc_feature (920)..(920): n is a, c, g, or t
  misc_feature (948)..(948): n is a, c, g, or t
  misc_feature (955)..(955): n is a, c, g, or t
  misc_feature (984)..(984): n is a, c, g, or t
  misc_feature (987)..(987): n is a, c, g, or t
  misc_feature (990)..(990): n is a, c, g, or t
  misc_feature (1010)..(1010): n is a, c, g, or t
  misc_feature (1019)..(1019): n is a, c, g, or t
  misc_feature (1031)..(1031): n is a, c, g, or t
  misc_feature (1045)..(1045): n is a, c, g, or t
  misc_feature (1066)..(1066): n is a, c, g, or t
  misc_feature (1073)..(1073): n is a, c, g, or t
  misc_feature (1080)..(1080): n is a, c, g, or t
  misc_feature (1084)..(1084): n is a, c, g, or t
  misc_feature (1086)..(1087): n is a, c, g, or t
  misc_feature (1107)..(1107): n is a, c, g, or t
  misc_feature (1140)..(1142): n is a, c, g, or t
  misc_feature (1153)..(1153): n is a, c, g, or t
  misc_feature (1156)..(1156): n is a, c, g, or t
  misc_feature (1159)..(1159): n is a, c, g, or t
  misc_feature (1166)..(1166): n is a, c, g, or t
  misc_feature (1172)..(1172): n is a, c, g, or t
  misc_feature (1174)..(1174): n is a, c, g, or t
  misc_feature (1183)..(1184): n is a, c, g, or t
  misc_feature (1199)..(1199): n is a, c, g, or t
  misc_feature (1206)..(1206): n is a, c, g, or t
  misc_feature (1211)..(1211): n is a, c, g, or t
tagaganattactatgagaggatcgcatcaccatcaccatcacggatcctatttaggtgacactatagaatcgtcgacccacgcgtccgggggtctcagagcagaccacctgccaggaagtggtcatcgcactagcccaagcaataggccagactggccgctttgtgcttgtgcagcggcttcgggagaaggagcggcagttgctgccacaagagtgtccagtgggcgcccaggccacctgcggacagtttgccagcgatgtccagtttgtcctgaggcgcacagggcccagcctagctgggaggccctcctcagacagctgtccacccccggaacgctgcctaattcgtgccagcctccctgtaaagccacgggctgcgctgggctgtgagccccgcaaaacactgacccccgagccagcccccagcctctcacgccctgggcctgcggcccctgtgacacccacaccaggctgctgcacagacctgcggggcctggagctcagagtgcagaggaatgctgaggagctgggccatgaggccttctgggagcaagagctgcgccgggagcaggcccgggagcgagagggacaggcacgcctgcaggcactaagtgcggccactgctgagcatgccgcccggctgcaggccctggacgctcaggcccgtgccctggaggctgagctgcagctggcagcggaggcccctgggcccccctcacctatggcatctgccactgagcgcctgcaccaggacctggctgttcaggagcggcaaantgcggaggtgcagggcagcctggctctggtgagccgggccctggaggcagcanancgagccttgcaggctcaggctcagganctggaaganctgaaccganagctccgtcagtgcaacctgcancanttcatccagcaaacnggggctgcgctgccaccgcccccacggnctgaaangggcccctcttggaactcaggttcggaantgnttnttggggggaagcctgggaangttaaaganccttggcccaanccccaattccaaanttgaatttcccaaacccaaanggggccnttttgcnttcnanncaaaaaaagaaattcccctncctggggggccctcccctttgaaatccccatgnnngggggcccaanccntangcccccnaaaggnantttttttgnncccccaccctccccntgggggnaaccngggccc

SEQ ID NO: 262 - DNA, 1179 bp, Homo Sapiens
  misc_feature (906)..(906): n is a, c, g, or t
  misc_feature (917)..(917): n is a, c, g, or t
  misc_feature (950)..(950): n is a, c, g, or t
  misc_feature (961)..(961): n is a, c, g, or t
  misc_feature (975)..(975): n is a, c, g, or t
  misc_feature (1003)..(1003): n is a, c, g, or t
  misc_feature (1007)..(1007): n is a, c, g, or t
  misc_feature (1023)..(1023): n is a, c, g, or t
  misc_feature (1049)..(1049): n is a, c, g, or t
  misc_feature (1075)..(1075): n is a, c, g, or t
  misc_feature (1089)..(1089): n is a, c, g, or t
  misc_feature (1096)..(1096): n is a, c, g, or t
  misc_feature (1098)..(1098): n is a, c, g, or t
  misc_feature (1109)..(1109): n is a, c, g, or t
  misc_feature (1114)..(1114): n is a, c, g, or t
  misc_feature (1127)..(1128): n is a, c, g, or t
  misc_feature (1137)..(1137): n is a, c, g, or t
  misc_feature (1150)..(1153): n is a, c, g, or t
  misc_feature (1161)..(1161): n is a, c, g, or t
  misc_feature (1164)..(1164): n is a, c, g, or t
  misc_feature (1172)..(1172): n is a, c, g, or t
  misc_feature (1176)..(1177): n is a, c, g, or t
aaatagagaaattactatgagaggatcgcatcaccatcaccatcacggatcctatttaggtgacactatagaatcgtcgacccacgcgtccgggggctctggtgccgggctgagcgggggaagcaggggtagcggagccatgggggacgctcccagccctgaagagaaactgcaccttatcacccggaacctgcaggaggttctgggggaagagaagctgaaggagatactgaaggagcgggaacttaaaatttactggggaacggcaaccacgggcaaaccacatgtggcttactttgtgcccatgtcaaagattgcagacttcttaaaggcagggtgtgaggtaacaattctgtttgcggacctccacgcatacctggataacatgaaagccccatgggaacttctagaactccgagtcagttactatgagaatgtgatcaaagcaatgctggagagcattggtgtgcccttggagaagctcaagttcatcaaaggcactgattaccagctcagcaaagagtacacactagatgtgtacagactctcctccgtggtcacacagcacgattccaagaaggctggagctgaggtggtaaagcaggtggagcaccctttgctgagtggcctcttataccccggactgcaggctttggatgaagagtatttaaaagtagatgcccaatttggaggcattgatcagagaaagattttcacctttgcagagaagtacctccctgcacttggctattcaaaacgggtccatctgatgaatcctatggttccaggattaacaggcagcaaaatgagctcttcagaagaggagtccaagattgatctccttgatcggaaggaggatgtgaagaaaaaactgaagaaggccttctgtgagccaggaatgtgganaacaatggggnttctgtccttcatcaagcatgtcctttttcccnttaagtccgantttgtgatcctacnaaatgaaaaatggggtggaaacaaaacntacncagcttacgtggaacntggaaaaggactttgctgctgaggtngtacctcctggaaaacctgaaaaatnttgttgaaatcccnctgaaananttgctggatcnatccnggaaaagtttaanncccctgccntgaaaaactggcnnnncttccttnccnaattcctnaaannaa

SEQ ID NO: 263 - DNA, 961 bp, Homo Sapiens
aactatgagaggatcgcatcaccatcaccatcacggatcctatttaggtgacactatagaatcgtcgacccacgcgtccgcccacgcgtccgctttcttcctaggggtctcctgctgccagctaagtgtgggagaacttgtgcacgtatctcccctccgaatcccaacgatgggtaacgccagctttggctccaaggaacagaagctgctgaagcggttgcggcttctgcccgccctgcttatcctccgcgccttcaagccccacaggaagatcagagattaccgcgtcgtggtagtcggcaccgctggtgtggggaaaagtacgctgctgcacaagtgggcgagcggcaacttccgtcatgagtacctgccgaccattgaaaatacctactgccagttgctgggctgcagccacggtgtgctttccctgcacatcaccgacagcaagagtggcgacggcaaccgcgctctgcagcgccacgttatagcccggggccacgccttcgtcctggtctactcagtcaccaagaaggaaaccctggaagagctgaaggccttctatgagctgatctgcaagatcaaaggtaacaacctgcataagttccccatcgtgctggtgggcaataaaagtgatgacacccaccgggaggtggccctgaatgatggtgccacctgtgcgatggagtggaattgcgccttcatggagatttcagccaagaccgatgtgaatgtgcaggagctgttccacatgctgctgaattacaagaaaaagcccaccaccggcctccaggagcccgagaagaaatcccagatgcccaacaccactgagaagctgcttgacaagtgcataatcatgtgagccctgggccttaagagccagctcttcctatcctgtagcgtgtagaaaacgtggactcatttcactatgttacatgtacatggttgattttgtgctgttgtt

SEQ ID NO: 264 - DNA, 866 bp, Homo Sapiens
  misc_feature (704)..(704): n is a, c, g, or t
  misc_feature (713)..(713): n is a, c, g, or t
  misc_feature (716)..(716): n is a, c, g, or t
  misc_feature (725)..(725): n is a, c, g, or t
  misc_feature (730)..(730): n is a, c, g, or t
  misc_feature (732)..(732): n is a, c, g, or t
  misc_feature (773)..(773): n is a, c, g, or t
  misc_feature (782)..(782): n is a, c, g, or t
  misc_feature (785)..(785): n is a, c, g, or t
  misc_feature (795)..(795): n is a, c, g, or t
  misc_feature (797)..(797): n is a, c, g, or t
  misc_feature (804)..(805): n is a, c, g, or t
  misc_feature (809)..(809): n is a, c, g, or t
  misc_feature (811)..(813): n is a, c, g, or t
  misc_feature (815)..(815): n is a, c, g, or t
  misc_feature (818)..(818): n is a, c, g, or t
  misc_feature (824)..(824): n is a, c, g, or t
  misc_feature (826)..(826): n is a, c, g, or t
  misc_feature (833)..(833): n is a, c, g, or t
  misc_feature (854)..(854): n is a, c, g, or t
  misc_feature (858)..(858): n is a, c, g, or t
  misc_feature (864)..(864): n is a, c, g, or t
  misc_feature (866)..(866): n is a, c, g, or t
tagagaaattactatgagaggatcgcatcaccatcaccatcacggaatcctatttaggtgacactatagaatcgtcgacccacgcgtccggaagcggcacaccgtctcgccggacacgcgtctctggagcggtacgaaggcctggcgcacagcagcagcaagggccgggaagcccctgggcggcctccccgggctgtacccaagctgggtgtgccaccctccagccccacacacggtccagctcccgcctgtaggagcggcgcagccaaggctgtgggggcccccaagccccctgttggtggaggcaagggccgtggcctagtggctggtgggtcgcgggctctggggccttcggtgaagctgtctacggcctctgtgacgggcaggagccctggcggccctgtggcaggtcccagagcagccccacgggccgggcccagtgtcggggcgaaggctggccggggtaccgtcatgggcacaaagcaggcgctccgggctgctcacagccgcgtccatgagctgtcagccagtggagccccgggccggggtggctcctcgtggggctcggcggactcagacagcggccatgacagcggcgtgaacgtgggggaggagcggccacccacgggcccggccctgccctccccctacagcaaggtgaccgccccacggcggccccagcgctacagcagcggccatggcancgacaacancancgtgctgantggananctgccgcccgccatgggccgcaccgcccttttccaccacancggtggcancancggctatganancctgcgnncganannnangcnaccggnancgcctcntccgcccctgattcatgaacnaaantggggntn

SEQ ID NO: 265 - DNA, 1141 bp, Homo Sapiens
  misc_feature (2)..(2): n is a, c, g, or t
  misc_feature (796)..(796): n is a, c, g, or t
  misc_feature (816)..(816): n is a, c, g, or t
  misc_feature (837)..(837): n is a, c, g, or t
  misc_feature (840)..(840): n is a, c, g, or t
  misc_feature (843)..(843): n is a, c, g, or t
  misc_feature (846)..(846): n is a, c, g, or t
  misc_feature (849)..(849): n is a, c, g, or t
  misc_feature (865)..(865): n is a, c, g, or t
  misc_feature (900)..(900): n is a, c, g, or t
  misc_feature (904)..(904): n is a, c, g, or t
  misc_feature (946)..(946): n is a, c, g, or t
  misc_feature (984)..(984): n is a, c, g, or t
  misc_feature (986)..(986): n is a, c, g, or t
  misc_feature (993)..(993): n is a, c, g, or t
  misc_feature (1010)..(1010): n is a, c, g, or t
  misc_feature (1020)..(1020): n is a, c, g, or t
  misc_feature (1023)..(1023): n is a, c, g, or t
  misc_feature (1026)..(1026): n is a, c, g, or t
  misc_feature (1046)..(1046): n is a, c, g, or t
  misc_feature (1052)..(1052): n is a, c, g, or t
  misc_feature (1060)..(1061): n is a, c, g, or t
  misc_feature (1064)..(1064): n is a, c, g, or t
  misc_feature (1070)..(1070): n is a, c, g, or t
  misc_feature (1079)..(1079): n is a, c, g, or t
  misc_feature (1084)..(1084): n is a, c, g, or t
  misc_feature (1087)..(1087): n is a, c, g, or t
  misc_feature (1093)..(1094): n is a, c, g, or t
  misc_feature (1107)..(1107): n is a, c, g, or t
  misc_feature (1110)..(1110): n is a, c, g, or t
  misc_feature (1112)..(1112): n is a, c, g, or t
  misc_feature (1129)..(1129): n is a, c, g, or t
  misc_feature (1132)..(1134): n is a, c, g, or t
  misc_feature (1136)..(1136): n is a, c, g, or t
  misc_feature (1140)..(1140): n is a, c, g, or t
antagagaaattactatgagaggatcgcatcaccatcaccatcacggatcctatttaggtgacactatagaatcgtcgacccacgcgtccgcccgccaccgcccacgggccgctagcagcgcagcgggcactatgagcgggggcgtctacggcggagatgaggtgggggcgctggtctttgacattggctccttctcagtccgcgctgggtacgctggggaggactgtcccaaggctgacttccccaccacagtggggctgctggccgcggaggaggggggcgggctggagctggagggggacaaagagaagaaagggaagatcttccacatcgacaccaatgccctgcacgtgcctcgggatggagcggaggtcatgtcgcccctcaagaatggcatgatcgaggactgggagtgcttccgagccatcctggatcacacctacagcaaacacgtcaagtctgagccaaacctgcacccagtgctcatgtccgaggctccgtggaacacacgggccaagcgggagaagctgacagagctgatgttcgagcagtacaacattcctgccttcttcttatgcaagacggctgtgctcaccgcctttgcaaacgggcggtccactggcctcgtgctggacagtggagccacccacaccacggccattccagtacatgacggctacgttctgcagcaaggcatcgtcaagtcccctctggcaggggacttcatctccatgcagtgccgggagctgttccaggagatggccattgacatcatcccaccttacatgatcgcanccaaggagcctgtccggganggtgccccccccaactggaanaanaanganaanctaccccaggtctccnagtcctggcataactacatgtgtaatgaggtgatncagnacttccaggcctccgtgctgcaggtctcaaactccccctacnatgaacaggtggctgcacaaatgccccagtgcactacnanatgcccnatggctacaataaaaantacggggccnaanganttccccatccctgaagggcntgtttnattccccnnaangtcaangggcctgtncgggnaanaccatnntttgggggtgggnccncntggggacccccccccantcnnncntggng

SEQ ID NO: 266 - DNA, 993 bp, Homo Sapiens
ctatgagaggtcgcatcaccatcaccatcacggatcctatttaggtgacactatagaatcgtcgacccacgcgtccggtcggcttgtcaggtggtggaggaaaaggcgctccgtcatggggatccagacgagccccgtcctgctggcctccctgggggtggggctggtcactctgctcggcctggctgtgggctcctacttggttcggaggtcccgccggcctcaggtcactctcctggaccccaatgaaaagtacctgctacgactgctagacaagacgactgtgagccacaacaccaagaggttccgctttgccctgcccaccgcccaccacactctggggctgcctgtgggcaaacatatctacctctccacccgaattgatggcagcctggtcatcaggccatacactcctgtcaccagtgatgaggatcaaggctatgtggatcttgtcatcaaggtctacctgaagggtgtgcaccccaaatttcctgagggagggaagatgtctcagtacctggatagcctgaaggttggggatgtggtggagtttcgggggccaagcgggttgctcacttacactggaaaagggcattttaacattcagcccaacaagaaatctccaccagaaccccgagtggcgaagaaactgggaatgattgccggcgggacaggaatcaccccaatgctacagctgatccgggccatcctgaaagtccctgaagatccaacccagtgctttctgctttttgccaaccagacagaaaaggatatcatcttgcgggaggacttagaggaactgcaggcccgctatcccaatcgctttaagctctggttcactctggatcatcccccaaaagattgggcctacagcaagggctttgtgactgccgacatgatccgggaacacctgcccgctccaggggatgatgtgctggtactgctttgtgggccacccccaatggtgcagctggcctgccatcccaacttgga

SEQ ID NO: 267 - DNA, 1179 bp, Homo Sapiens
  misc_feature (819)..(819): n is a, c, g, or t
  misc_feature (870)..(870): n is a, c, g, or t
  misc_feature (872)..(872): n is a, c, g, or t
  misc_feature (910)..(910): n is a, c, g, or t
  misc_feature (913)..(914): n is a, c, g, or t
  misc_feature (929)..(929): n is a, c, g, or t
  misc_feature (953)..(953): n is a, c, g, or t
  misc_feature (959)..(960): n is a, c, g, or t
  misc_feature (962)..(962): n is a, c, g, or t
  misc_feature (972)..(972): n is a, c, g, or t
  misc_feature (979)..(979): n is a, c, g, or t
  misc_feature (983)..(983): n is a, c, g, or t
  misc_feature (995)..(995): n is a, c, g, or t
  misc_feature (1004)..(1005): n is a, c, g, or t
  misc_feature (1010)..(1010): n is a, c, g, or t
  misc_feature (1018)..(1018): n is a, c, g, or t
  misc_feature (1025)..(1025): n is a, c, g, or t
  misc_feature (1038)..(1038): n is a, c, g, or t
  misc_feature (1047)..(1047): n is a, c, g, or t
  misc_feature (1060)..(1060): n is a, c, g, or t
  misc_feature (1075)..(1075): n is a, c, g, or t
  misc_feature (1080)..(1082): n is a, c, g, or t
  misc_feature (1088)..(1089): n is a, c, g, or t
  misc_feature (1101)..(1101): n is a, c, g, or t
  misc_feature (1112)..(1112): n is a, c, g, or t
  misc_feature (1117)..(1117): n is a, c, g, or t
  misc_feature (1127)..(1127): n is a, c, g, or t
  misc_feature (1137)..(1137): n is a, c, g, or t
  misc_feature (1139)..(1139): n is a, c, g, or t
  misc_feature (1141)..(1141): n is a, c, g, or t
  misc_feature (1148)..(1148): n is a, c, g, or t
  misc_feature (1152)..(1152): n is a, c, g, or t
  misc_feature (1156)..(1156): n is a, c, g, or t
  misc_feature (1159)..(1159): n is a, c, g, or t
  misc_feature (1166)..(1166): n is a, c, g, or t
  misc_feature (1169)..(1169): n is a, c, g, or t
  misc_feature (1173)..(1173): n is a, c, g, or t
  misc_feature (1176)..(1176): n is a, c, g, or t
tagagaaattactatgagaggatcgcatcaccatcaccatcacggatcctatttaggtgacactatagaatcgtcgacccacgcgtccggccagctccaccagcacgtgcagcagctacacctgggcacccggctgcctgtggtggtcgtggccaacaaagctgacctgttgcacatcaaacaggttgaccctcagcttggactgcagctagccagcatgctaggctgctcattctatgaagtgtctgtcagtgaaaattataatgatgtctacagcgccttccacgtcctctgtaaagaggtcagtcacaaacagcagcctagcagtacacccgagaagcgaagaacctccctcattcccaggcccaagtcacccaacatgcaggacctgaagaggaggtttaagcaagccctctctgccaaagtgaggactgtcacctccgtctgaagcaggaggagcactcaagggggtttggtcttcccaggaagagggcctgaggttctcctagtgcaggaacgttgaatattggcaatgattcctggttccagaaagggctggagcagaagggccaagagggcctgtggaactgctacagaaaaggaagtgttgttctgagcagggggacaggattgatgaggcttgaaagagcccactgagccactctctgaatatgtgaaatgtactctgtgtcttttcctttagagtggggagggggcataatcgtttcggtttctgcattcaactaccttgtaaatggtggtccgttgcagtttcaccaaatgtattgatgtgatttacagtgggaatgaaagaaacanataaggcattgataggctttccttttttcccccctttttttccttttttcncntttcctcctttccttttccccccttttttcccccaaanaannaaaaattggcttttnccccttaaccaaaaatgaatttgntaaacnntngaaacacctnattcttnaaanaatggccctttntaaaacctnnaaagnaaaccccnaaatttntttttttttttgnaaaaaaaangaaaaatcccccntaccccccaaaaaanaggtnnnattttnngggccccaaaantatttttttanacccnaaaaattggnaaactcctcngngnttaaaanaaancctntgnttccccnccnccanganata

SEQ ID NO: 268 - DNA, 879 bp, Homo Sapiens
  misc_feature (567)..(567): n is a, c, g, or t
  misc_feature (642)..(642): n is a, c, g, or t
  misc_feature (677)..(677): n is a, c, g, or t
  misc_feature (679)..(679): n is a, c, g, or t
  misc_feature (689)..(689): n is a, c, g, or t
  misc_feature (693)..(693): n is a, c, g, or t
  misc_feature (709)..(709): n is a, c, g, or t
  misc_feature (713)..(713): n is a, c, g, or t
  misc_feature (715)..(715): n is a, c, g, or t
  misc_feature (724)..(724): n is a, c, g, or t
  misc_feature (733)..(733): n is a, c, g, or t
  misc_feature (739)..(739): n is a, c, g, or t
  misc_feature (742)..(742): n is a, c, g, or t
  misc_feature (749)..(750): n is a, c, g, or t
  misc_feature (753)..(753): n is a, c, g, or t
  misc_feature (760)..(760): n is a, c, g, or t
  misc_feature (763)..(763): n is a, c, g, or t
  misc_feature (766)..(766): n is a, c, g, or t
  misc_feature (769)..(769): n is a, c, g, or t
  misc_feature (786)..(786): n is a, c, g, or t
  misc_feature (788)..(789): n is a, c, g, or t
  misc_feature (793)..(793): n is a, c, g, or t
  misc_feature (808)..(808): n is a, c, g, or t
  misc_feature (811)..(811): n is a, c, g, or t
  misc_feature (814)..(814): n is a, c, g, or t
  misc_feature (819)..(820): n is a, c, g, or t
  misc_feature (832)..(832): n is a, c, g, or t
  misc_feature (840)..(840): n is a, c, g, or t
  misc_feature (843)..(844): n is a, c, g, or t
  misc_feature (860)..(860): n is a, c, g, or t
  misc_feature (867)..(867): n is a, c, g, or t
  misc_feature (870)..(870): n is a, c, g, or t
  misc_feature (873)..(873): n is a, c, g, or t
  misc_feature (879)..(879): n is a, c, g, or t
cataagagaaattactatgagaggatcgcatcaccatcaccatcacggatcctatttaggtgacactatagaatcgtcgacccacgcgtccgagatcctggaggagatcaagcaggagcggaggctgcgcccggtgcggggcgagggctgggctgcccgcgggtttggctctctgccctgcatcctcaacgcctgctccggagatgccaagtccacctcctgcatcaacctgtcagtcacagatgctgggggcagcgcccagcgcccgcggccccgcgtgctgctcaaggcgcctaccttggctgaaatggaagagatgaatacatctgaggaagaagagtctccgtgtggggaggtgacgctgaaacgggaccgctccttctcagagcatgacctggcccagctccgaagtgaggtggcctctggcctgcagtcggccacccaccccccaggagggacggagccaccacggccccgagctggcagtgcgcatgtgtggaggcccggctcccgagaccagggtacctgtcccgcgagtgtctctgaccccagccaccccctactcancaaccggggctcctcgggggacagacccgaggcctccatgacccccgatgccaaacacctgtggctggagttcanccaccccgtggagagcctggcgctgactgtggaanangtgatggacntgcnccgtgtgctggtgaangccnanatggaaaantttttgcanaacaanganctcttcnncantctgaanaanggnaanatttgctgctgctgccngnncaanttcccgctgttctcntgnccncccanntgtctcttctgnaaaaaaanccnnctgcacttcctgtatnataaaanatnaanatgccn

SEQ ID NO: 269 - DNA, 1015 bp, Homo Sapiens
  misc_feature (716)..(716): n is a, c, g, or t
  misc_feature (870)..(870): n is a, c, g, or t
  misc_feature (876)..(876): n is a, c, g, or t
  misc_feature (878)..(878): n is a, c, g, or t
  misc_feature (881)..(881): n is a, c, g, or t
  misc_feature (885)..(885): n is a, c, g, or t
  misc_feature (891)..(894): n is a, c, g, or t
  misc_feature (896)..(896): n is a, c, g, or t
  misc_feature (899)..(899): n is a, c, g, or t
  misc_feature (905)..(905): n is a, c, g, or t
  misc_feature (908)..(908): n is a, c, g, or t
  misc_feature (913)..(913): n is a, c, g, or t
  misc_feature (924)..(924): n is a, c, g, or t
  misc_feature (926)..(926): n is a, c, g, or t
  misc_feature (931)..(931): n is a, c, g, or t
  misc_feature (934)..(934): n is a, c, g, or t
  misc_feature (941)..(941): n is a, c, g, or t
  misc_feature (949)..(949): n is a, c, g, or t
  misc_feature (958)..(958): n is a, c, g, or t
  misc_feature (962)..(962): n is a, c, g, or t
  misc_feature (964)..(964): n is a, c, g, or t
  misc_feature (982)..(982): n is a, c, g, or t
  misc_feature (987)..(987): n is a, c, g, or t
  misc_feature (989)..(989): n is a, c, g, or t
  misc_feature (995)..(995): n is a, c, g, or t
  misc_feature (1008)..(1008): n is a, c, g, or t
  misc_feature (1010)..(1010): n is a, c, g, or t
tagagaaattactatgagaggatcgcatcaccatcaccatcacggatcctatttaggtgacactatagaatcgtcgacccacgcgtccgcaccgacttcgacggcacccgagtgtacagccccccggagtggatccgctaccaccgctaccacgggcgctcggccaccgtgtggtcgctgggcgtgcttctctacgatatggtgtgtggggacatccccttcgagcaggacgaggagatcctccgaggccgcctgctcttccggaggagggtctctccagagtgccagcagctgatccggtggtgcctgtccctgcggccctcagagcggccgtcgctggatcagattgcggcccatccctggatgctgggggctgacgggggcgccccggagagctgtgacctgcggctgtgcaccctcgaccctgatgacgtggccagcaccacgtccagcagcgagagcttgtgaggagctgcacctgactgggagctaggggaccacctgccttggccagacctgggacgcccccagaccctgactttttcctgcgtgggccgtctcctcctgcggaagcagtgacctctgacccctggtgaccttcgctttgagtgccttttgaacgctggtcccgcgggacttggttttctcaagctctgtctgtccaaagacgctccggtcgaggtcccgcctgccctgggtggatacttgaaccccanacgcccctctgtgctgctgtgtccggaggcggccttcccatctgcctgcccacccggagctctttccgccggcgcagggtcccaaagcccacctcccgccctcatcctgcggtgtgcgtctgggcacgtcctgcacacacaatgcaatcttggnctccgngnccngccngcccannnnanccntacccnccnccaantctgttatttnanggtgngancccctgnagtgcccncggcccacngggncnaatttattgtttaattantttgntnaaggtnatttcctctgaanantttgc

SEQ ID NO: 270 - DNA, 1179 bp, Homo Sapiens
  misc_feature (895)..(895): n is a, c, g, or t
  misc_feature (920)..(920): n is a, c, g, or t
  misc_feature (932)..(932): n is a, c, g, or t
  misc_feature (959)..(959): n is a, c, g, or t
  misc_feature (970)..(970): n is a, c, g, or t
  misc_feature (982)..(982): n is a, c, g, or t
  misc_feature (994)..(994): n is a, c, g, or t
  misc_feature (1028)..(1028): n is a, c, g, or t
  misc_feature (1043)..(1043): n is a, c, g, or t
  misc_feature (1045)..(1045): n is a, c, g, or t
  misc_feature (1052)..(1052): n is a, c, g, or t
  misc_feature (1065)..(1065): n is a, c, g, or t
  misc_feature (1078)..(1078): n is a, c, g, or t
  misc_feature (1088)..(1088): n is a, c, g, or t
  misc_feature (1091)..(1091): n is a, c, g, or t
  misc_feature (1095)..(1095): n is a, c, g, or t
  misc_feature (1099)..(1100): n is a, c, g, or t
  misc_feature (1106)..(1106): n is a, c, g, or t
  misc_feature (1114)..(1114): n is a, c, g, or t
  misc_feature (1120)..(1120): n is a, c, g, or t
  misc_feature (1124)..(1124): n is a, c, g, or t
  misc_feature (1129)..(1129): n is a, c, g, or t
  misc_feature (1136)..(1136): n is a, c, g, or t
  misc_feature (1139)..(1139): n is a, c, g, or t
  misc_feature (1145)..(1145): n is a, c, g, or t
  misc_feature (1148)..(1148): n is a, c, g, or t
  misc_feature (1155)..(1155): n is a, c, g, or t
  misc_feature (1162)..(1162): n is a, c, g, or t
  misc_feature (1167)..(1167): n is a, c, g, or t
  misc_feature (1170)..(1171): n is a, c, g, or t
  misc_feature (1174)..(1174): n is a, c, g, or t
aatagagaaattactatgagaggatcgcatcaccatcaccatcacggatcctatttaggtgacactatagaatcgtcgacccacgcgtccgcagcaagcgtggggcgcgggaacccgagcaggactctccagtcctcagtcaccttggacaaagaagtgtggatcctcagattccatcttttccaactccaaggtgccatggcagagaaggtgctggtaacaggtggggctggctacattggcagccacacggtgctggagctgctggaggctggctacttgcctgtggtcatcgataacttccataatgccttccgtggagggggctccctgcctgagagcctgcggcgggtccaggagctgacaggccgctctgtggagtttgaggagatggacattttggaccagggagccctacagcgtctcttcaaaaagtacagctttatggcggtcatccactttgcggggctcaaggccgtgggcgagtcggtgcagaagcctctggattattacagagttaacctgaccgggaccatccagcttctggagatcatgaaggcccacggggtgaagaacctggtgttcagcagctcagccactgtgtacgggaacccccagtacctgccccttgatgaggcccaccccacgggtggttgtaccaacccttacggcaagtccaagttcttcatcgaggaaatgatccgggacctgtgccaggcagacaagacttggaacgcagtgctgctgcgctatttcaaccccacaggtgcccatgcctctggctgcattggtgaggatccccagggcatacccaacaacctcatgccttatgtctcccaggtggcgatcgggcgacgggaggccctgaatgtctttggcaatgactatgacacanaggatggcacaggtgtccgggattnacatccatgtcntggatctggccaagggccacattgcanccttaaggaanctgaaaaaacantgtggctgccgnatctacaacctgggcacgggcacaggctattcantgctgcaaatggtcnangctatgnaaaagcctctggnaaaaaatccctanaaggggtgcncgncggnaagnnatgggncacctgtnacccancccncctgnccaaaanaantggggnganacacctnaggctgnaagantgnnaanatttg

SEQ ID NO: 271 - DNA, 1155 bp, Homo Sapiens
  misc_feature (754)..(754): n is a, c, g, or t
  misc_feature (757)..(757): n is a, c, g, or t
  misc_feature (760)..(760): n is a, c, g, or t
  misc_feature (869)..(869): n is a, c, g, or t
  misc_feature (881)..(881): n is a, c, g, or t
  misc_feature (886)..(886): n is a, c, g, or t
  misc_feature (888)..(888): n is a, c, g, or t
  misc_feature (898)..(898): n is a, c, g, or t
  misc_feature (922)..(922): n is a, c, g, or t
  misc_feature (925)..(925): n is a, c, g, or t
  misc_feature (954)..(954): n is a, c, g, or t
  misc_feature (967)..(967): n is a, c, g, or t
  misc_feature (969)..(969): n is a, c, g, or t
  misc_feature (972)..(972): n is a, c, g, or t
  misc_feature (975)..(975): n is a, c, g, or t
  misc_feature (982)..(982): n is a, c, g, or t
  misc_feature (988)..(988): n is a, c, g, or t
  misc_feature (991)..(991): n is a, c, g, or t
  misc_feature (995)..(995): n is a, c, g, or t
  misc_feature (997)..(997): n is a, c, g, or t
  misc_feature (1006)..(1007): n is a, c, g, or t
  misc_feature (1011)..(1011): n is a, c, g, or t
  misc_feature (1013)..(1013): n is a, c, g, or t
  misc_feature (1027)..(1027): n is a, c, g, or t
  misc_feature (1047)..(1047): n is a, c, g, or t
  misc_feature (1051)..(1051): n is a, c, g, or t
  misc_feature (1062)..(1062): n is a, c, g, or t
  misc_feature (1078)..(1078): n is a, c, g, or t
  misc_feature (1094)..(1094): n is a, c, g, or t
  misc_feature (1098)..(1098): n is a, c, g, or t
  misc_feature (1103)..(1103): n is a, c, g, or t
  misc_feature (1108)..(1108): n is a, c, g, or t
  misc_feature (1117)..(1117): n is a, c, g, or t
  misc_feature (1120)..(1120): n is a, c, g, or t
  misc_feature (1131)..(1131): n is a, c, g, or t
  misc_feature (1138)..(1138): n is a, c, g, or t
  misc_feature (1141)..(1141): n is a, c, g, or t
  misc_feature (1145)..(1145): n is a, c, g, or t
tagagaaattactatgagaggatcgcatcaccatcaccatcacggatcctatttaggtgacactatagaatcgtcgacccacgcgtccgcccacgcgtccggtgaactggctacatgctctccccgtgacggggccggagctgggctggggacaccccctggaggtgacgtctgctcctctgattccttcaacgaggacatcgctgcctttgccaagcaggttcgctctgagaggcccctcttctcctccaacccagaactggacaatctgatgatccaggccatccaggtgctgcggttccacctgctggagctggagaaggtccacgacctgtgcgacaacttctgtcaccgctacatcacctgcctcaagggaaagatgcccatcgacctggtcatcgaggatcgggacggcggctgcagggaggacttcgaggactacccagcctcctgccccagcctcccagaccagaataatatgtggattcgagaccatgaggatagtgggtctgtacatttggggaccccaggtccatccagtgggggcctggcctcccagagtggggacaactccagtgaccaaggagacgggctggacaccagcgtggcctctcccagttctggtggagaagatgaggacttggaccaggagcgacggcgaaacaagaagagggggatcttccccaaggtggccaccaacatcatgcgagcctggttgttccagcacctctcgcacccgtacccctcggaggancanaanaaacagctggcgcaggacacggggctcaccatcctgcaagtcaacaactggttcattaacgcccggagacgcatcgtgcaacctatgatcgatcaatccaaccgcacanggcaaggtgcanccttnancccaaaaggncagcccatcgggggctataccganacncaaccacacgtggccgtccggcctccggnatcatggggaatnanttnaanttggaangaaaanggnattntntaaaaaagnntgangncaggaaaaacccancctccgggtgtgaaccccancctnaaacctggctngggttcccgcctgggncctccactttcaggancccncctcnaaggnccctttgtnaangccaacctccnaaggccntgntggnaaagggggcc

SEQ ID NO: 272 - DNA, 1160 bp, Homo Sapiens
  misc_feature (1)..(4): n is a, c, g, or t
  misc_feature (827)..(827): n is a, c, g, or t
  misc_feature (833)..(833): n is a, c, g, or t
  misc_feature (860)..(860): n is a, c, g, or t
  misc_feature (892)..(892): n is a, c, g, or t
  misc_feature (899)..(899): n is a, c, g, or t
  misc_feature (904)..(904): n is a, c, g, or t
  misc_feature (906)..(906): n is a, c, g, or t
  misc_feature (918)..(918): n is a, c, g, or t
  misc_feature (932)..(932): n is a, c, g, or t
  misc_feature (954)..(954): n is a, c, g, or t
  misc_feature (960)..(960): n is a, c, g, or t
  misc_feature (967)..(967): n is a, c, g, or t
  misc_feature (970)..(970): n is a, c, g, or t
  misc_feature (975)..(975): n is a, c, g, or t
  misc_feature (987)..(988): n is a, c, g, or t
  misc_feature (1001)..(1001): n is a, c, g, or t
  misc_feature (1006)..(1006): n is a, c, g, or t
  misc_feature (1018)..(1018): n is a, c, g, or t
  misc_feature (1027)..(1027): n is a, c, g, or t
  misc_feature (1031)..(1031): n is a, c, g, or t
  misc_feature (1034)..(1034): n is a, c, g, or t
  misc_feature (1043)..(1043): n is a, c, g, or t
  misc_feature (1056)..(1056): n is a, c, g, or t
  misc_feature (1060)..(1060): n is a, c, g, or t
  misc_feature (1064)..(1064): n is a, c, g, or t
  misc_feature (1068)..(1068): n is a, c, g, or t
  misc_feature (1082)..(1082): n is a, c, g, or t
  misc_feature (1084)..(1084): n is a, c, g, or t
  misc_feature (1089)..(1090): n is a, c, g, or t
  misc_feature (1101)..(1101): n is a, c, g, or t
  misc_feature (1110)..(1110): n is a, c, g, or t
  misc_feature (1117)..(1117): n is a, c, g, or t
  misc_feature (1122)..(1124): n is a, c, g, or t
  misc_feature (1134)..(1134): n is a, c, g, or t
  misc_feature (1140)..(1140): n is a, c, g, or t
  misc_feature (1143)..(1143): n is a, c, g, or t
  misc_feature (1146)..(1147): n is a, c, g, or t
  misc_feature (1153)..(1153): n is a, c, g, or t
  misc_feature (1158)..(1159): n is a, c, g, or t
nnnnattagagaaattactatgagaggatcgcatcaccatcaccatcacggatcctatttaggtgacactatagaatcgtcgacccacgcgtccgtcccaaacgaggtgcgggacggaagagggggtgaaggccagaggctcggggcttcaagaccgctgtctggagtccccctttccaggccatgtcggggcccacctggctgcccccgaagcagccggagcccgccagagcccctcaggggagggcgatcccccgcggcaccccggggccaccaccggcccacggagcagcactccagccccaccccagggtcaatttttgcccccttccatctgagcagtgttaccaggccccagggggaccggaggatcgggggccggcgtgggtggggtcccatggagtactccagcacacgcaggggctccctgcagacagggggggccttcgccctggaagcctggacgccgagatagacttgctgagcagcacgctggccgagctgaatgggggtcggggtcatgcgtcacggcgaccagaccgacaggcatatgagcccccgccacctcctgcctaccgcacgggctccctgaagccaaatccagcctcgccgctcccagcgtctccctatgggggccccactccagcctcttacactaccgccagcaccccggctggcccagccttccccgtgcaagtgaaggtggcacagccagtgaggggctgcggcccacccaggcggggagcctctcaggcctctgggcccctcccgggcccccactttcctctcccaggccgaggtgaagtctgggggcctggctatagganccaganagagccagggccaggggccaaaaaagnaagctgctggggtctctggccctgcagaaaangaaaagnaggcnancacgggccccangtgccctgaaccancttcaaaagatgaactggatangctganaaaaaantgntcacnaatgaaccaccnnccagcgggaatantttgntaacttaagctntgggtggtngaantgnaaaggaagntggaaaaaaaggnaaantggntttntgggtctgtaaaantnatgcnntttctccctgncctcaggcnatttggnggctnnnaaaaaatttntttggnaanggnnttgggnttttnnc

SEQ ID NO: 273 - DNA, 1177 bp, Homo Sapiens
  misc_feature (894)..(894): n is a, c, g, or t
  misc_feature (925)..(925): n is a, c, g, or t
  misc_feature (964)..(965): n is a, c, g, or t
  misc_feature (970)..(970): n is a, c, g, or t
  misc_feature (988)..(989): n is a, c, g, or t
  misc_feature (1009)..(1009): n is a, c, g, or t
  misc_feature (1011)..(1011): n is a, c, g, or t
  misc_feature (1014)..(1014): n is a, c, g, or t
  misc_feature (1019)..(1019): n is a, c, g, or t
  misc_feature (1025)..(1026): n is a, c, g, or t
  misc_feature (1060)..(1060): n is a, c, g, or t
  misc_feature (1065)..(1065): n is a, c, g, or t
  misc_feature (1067)..(1067): n is a, c, g, or t
  misc_feature (1069)..(1069): n is a, c, g, or t
  misc_feature (1074)..(1074): n is a, c, g, or t
  misc_feature (1076)..(1076): n is a, c, g, or t
  misc_feature (1083)..(1083): n is a, c, g, or t
  misc_feature (1089)..(1089): n is a, c, g, or t
  misc_feature (1097)..(1097): n is a, c, g, or t
  misc_feature (1107)..(1107): n is a, c, g, or t
  misc_feature (1113)..(1113): n is a, c, g, or t
  misc_feature (1123)..(1123): n is a, c, g, or t
  misc_feature (1129)..(1129): n is a, c, g, or t
  misc_feature (1132)..(1132): n is a, c, g, or t
  misc_feature (1143)..(1143): n is a, c, g, or t
  misc_feature (1145)..(1145): n is a, c, g, or t
  misc_feature (1150)..(1150): n is a, c, g, or t
  misc_feature (1153)..(1153): n is a, c, g, or t
  misc_feature (1155)..(1155): n is a, c, g, or t
  misc_feature (1158)..(1158): n is a, c, g, or t
agagaaattactatgagaggatcgcatcaccatcaccatcacggatcctatttaggtgacactatagaatcgtcgacccacgcgtccgcccacgcgtccggagaacggccttttgaatgctgtgattgtggtaaagccttcagtaatagctccaccctcatccagcaccagaaagtacatactgggcaaaggccttatgagtgcagcgaatgtaggaaatccttcagccgcagctccagcctgattcagcactggagaattcacactggagaaaagccttacgagtgtagtgagtgtgggaaagcctttgctcacagctccactctcattgaacactggagagttcacacaaaagaaaggccttatgagtgcaatgaatgtgggaaattctttagccaaaactccattctcattaagcatcagaaagttcatactggagaaaagccttataaatgcagtgaatgtgggaaattctttagccgaaaatccagccttatttgtcactggagagttcacactggagaaaggccttacgaatgcagtgaatgtgggagagcctttagcagtaactcccacctggttcgtcatcagagagttcacacacaagaaaggccctatgagtgcatccagtgtggaaaagcctttagtgaaagatctacacttgttcggcaccagaaagttcacaccagagaaaggacttatgagtgtagccagtgtgggaaactcttcagccatctttgtaaccttgcacagcataaaaagattcatacctgagtggagccttatggaagtggtctttgtgagaaaatcttcagccaagtcaaacttcatgcagcagaatccccataccagaaaaattacctacatgtactgctaatgtggaaaagccttcanaagctactctgtttctgaccagcccaggaanctttgcagggccatctcacccatgcagcataaggcaaannccaantcactttccatcttggcnnggatccaaaaattgcagcantnctngtccncatgcnnggggaaaacagtaccctgaacccttccttcctgngttcncnanggatncnggactgngctccnctgaaccnaagctggttnaagggnccttgaaggnaaatcnaantttgaaccccngnaaaangcnanttnccttgggggaggggggcca

SEQ ID NO: 274 - DNA, 1132 bp, Homo Sapiens
  misc_feature (970)..(970): n is a, c, g, or t
  misc_feature (973)..(973): n is a, c, g, or t
  misc_feature (980)..(980): n is a, c, g, or t
  misc_feature (996)..(996): n is a, c, g, or t
  misc_feature (1003)..(1003): n is a, c, g, or t
  misc_feature (1006)..(1006): n is a, c, g, or t
  misc_feature (1022)..(1022): n is a, c, g, or t
  misc_feature (1029)..(1029): n is a, c, g, or t
  misc_feature (1033)..(1033): n is a, c, g, or t
  misc_feature (1040)..(1040): n is a, c, g, or t
  misc_feature (1045)..(1045): n is a, c, g, or t
  misc_feature (1074)..(1074): n is a, c, g, or t
  misc_feature (1079)..(1079): n is a, c, g, or t
  misc_feature (1096)..(1096): n is a, c, g, or t
  misc_feature (1098)..(1100): n is a, c, g, or t
  misc_feature (1103)..(1103): n is a, c, g, or t
  misc_feature (1113)..(1113): n is a, c, g, or t
  misc_feature (1116)..(1116): n is a, c, g, or t
  misc_feature (1122)..(1123): n is a, c, g, or t
  misc_feature (1128)..(1128): n is a, c, g, or t
tagagaaattactatgagaggatcgcatcaccatcaccatcacggatcctatttaggtgacactatagaatcgtcgacccacgcgtccgggtccaatgagcgggtcatgggttgggtgtccgggctgggcctgaaggaatttgccacgaacctcacggagagcggggtacacggggcactgctcgccctggacgagaccttcgactactccgacctggccttgctcctgcagatccccacgcagaatgcacaggcccggcagcttctggagaaggaattcagcaaccttatctccttaggcacagacaggcggctggacgaggacagcgccaagtctttcagccgctccccatcctggcggaagatgttccgggagaaggacctccgaggcgtaactcccgactcagctgagatgttgccccccaactttcgttcggctgcagcgggagccctgggctctccggggctccctctccgcaagctgcagccagaaggccagacttctgggagttcccgggcagacggcgtttcggtccggacctattcctgctagtgcaggcctccaggtgacctcactcggacggaagaatcttcccgaggctgggctgttccctctcctgcccggactgtggcctcgccggggagagcgggcgggggagctcgcgccgaggactggaccatctgtacagaccagcgggagtgcgcgcgcccgcctcgcacagggccggggcctggaccaaaccacatgaactggactgagagggggaagaagcggggaggaagaaatcccgccccaaacgtccgctttccttttctctactttgtaatttattgatcagtttctgttgggagacgggtgtcctttacccgcgggaagggggcggggcttccctcccgggccgcatgcggggagaggctgctccctcccctttttcctgcccagtcgcggggcccaagtcttccttcttcntcnaaagganggggaggggggactcnctgctanaancctcgccccctgtgcnattcaantccncccgccncgtcnggtcgccggtccccgggtcatctgggggnggttncccctcccctccccggntnnnggnccccgggccnccncccccnnggttnggcc

SEQ ID NO: 275 - DNA, 1009 bp, Homo Sapiens
  misc_feature (808)..(808): n is a, c, g, or t
  misc_feature (823)..(823): n is a, c, g, or t
  misc_feature (858)..(858): n is a, c, g, or t
  misc_feature (866)..(866): n is a, c, g, or t
  misc_feature (878)..(878): n is a, c, g, or t
  misc_feature (900)..(900): n is a, c, g, or t
  misc_feature (903)..(903): n is a, c, g, or t
  misc_feature (930)..(930): n is a, c, g, or t
  misc_feature (933)..(933): n is a, c, g, or t
  misc_feature (944)..(944): n is a, c, g, or t
  misc_feature (954)..(954): n is a, c, g, or t
  misc_feature (962)..(962): n is a, c, g, or t
  misc_feature (966)..(966): n is a, c, g, or t
  misc_feature (971)..(972): n is a, c, g, or t
  misc_feature (974)..(974): n is a, c, g, or t
  misc_feature (980)..(982): n is a, c, g, or t
  misc_feature (985)..(985): n is a, c, g, or t
  misc_feature (1002)..(1002): n is a, c, g, or t
  misc_feature (1005)..(1005): n is a, c, g, or t
  misc_feature (1008)..(1008): n is a, c, g, or t
agaaattactatgagaggatcgcatcaccatcaccatcacggatcctatttaggtgacactatagaatcgtcgacccacgcgtccggccggtgcctcaagtgctcctgctgccaggcgcagctgggcgacatcggcacgtcctgttacaccaaaagtggcatgatcctttgcagaaatgactacattaggttatttggaaatagcggtgcttgcagcgcttgcggacagtcgattcctgcgagtgaactcgtcatgagggcgcaaggcaatgtgtatcatcttaagtgttttacatgctctacctgccggaatcgcctggtcccgggagatcggtttcactacatcaatggcagtttattttgtgaacatgatagacctacagctctcatcaatggccatttgaattcacttcagagcaatccactactgccagaccagaaggtctgctaaaaggtcagagtaatgcagaatgcgtgccttcatctcagatttgttcatcacaggtggatcccatgtgtcttcagtagacaagtcacctttgtagctagcaccagtgccagctccatgccattgcaccttctttagtcttgattgcccttcccgcatttattggtgtattaaaatgactgaatatgaacattaaggactccatgaacctgggctaatgggagactgtagagaaaatgaaaaaagatccaccagaggacatcttggggagggggagggagctgggggggagggaaaatgactaatgaagctaattaaaagaagcattcaaatctgctttctaccctcattaacaattancagggcactggccanagtttgtaccctgtgttttaccttaacaacattcnatttggcncttggaaaattnaagggttggaaaggaaacgtgnttncaatcaaaaactgaccatgaaaaaaanggnaaagagaatgnggccttttgngaaattcnatcncaaanncntattgnnnccnctgtaaaaaacaatgtnagnaanc

SEQ ID NO: 276 - DNA, 1179 bp, Homo Sapiens
  misc_feature (892)..(892): n is a, c, g, or t
  misc_feature (905)..(905): n is a, c, g, or t
  misc_feature (946)..(946): n is a, c, g, or t
  misc_feature (965)..(965): n is a, c, g, or t
  misc_feature (980)..(980): n is a, c, g, or t
  misc_feature (988)..(988): n is a, c, g, or t
  misc_feature (1009)..(1009): n is a, c, g, or t
  misc_feature (1019)..(1019): n is a, c, g, or t
  misc_feature (1023)..(1023): n is a, c, g, or t
  misc_feature (1026)..(1026): n is a, c, g, or t
  misc_feature (1045)..(1045): n is a, c, g, or t
  misc_feature (1051)..(1051): n is a, c, g, or t
  misc_feature (1054)..(1054): n is a, c, g, or t
  misc_feature (1056)..(1058): n is a, c, g, or t
  misc_feature (1062)..(1062): n is a, c, g, or t
  misc_feature (1066)..(1066): n is a, c, g, or t
  misc_feature (1085)..(1085): n is a, c, g, or t
  misc_feature (1089)..(1089): n is a, c, g, or t
  misc_feature (1095)..(1095): n is a, c, g, or t
  misc_feature (1098)..(1098): n is a, c, g, or t
  misc_feature (1100)..(1100): n is a, c, g, or t
  misc_feature (1112)..(1112): n is a, c, g, or t
  misc_feature (1135)..(1135): n is a, c, g, or t
  misc_feature (1142)..(1143): n is a, c, g, or t
  misc_feature (1154)..(1155): n is a, c, g, or t
  misc_feature (1159)..(1159): n is a, c, g, or t
  misc_feature (1164)..(1164): n is a, c, g, or t
  misc_feature (1167)..(1168): n is a, c, g, or t
  misc_feature (1177)..(1177): n is a, c, g, or t
gattagagagaattactatgagaggatcgcatcaccatcaccatcacggatcctatttaggtgacactatagaatcgtcgacccacgcgtccggtccccgagaccaacgcgtgcgggccgaacctctccccccgccttcccccaacaatacaggacgccggggtccgcgccgcgtcctccctggtccccccgtccgattatgtctcggatcgaatccctcacgcgggcgcggatcgaccggagcagagagctggcgagcaagacccgggaaaaggagaagatgaaggaagccaaggatgcccgctataccaatgggcacctcttcaccaccatttcagtttcaggcatgaccatgtgctatgcctgtaacaagagcatcacagccaaggaagccctcatctgcccaacctgcaatgtgactatccacaaccgctgtaaagacaccctcgccaactgtaccaaggtcaagcagaagcaacagaaagcggccctgctgaagaacaacaccgccttgcagtccgtttctcttcgaagtaagacaaccatccgggagcggccaagctcggccatctacccctccgacagcttccggcagtccctcctgggctcccgccgtggccgctcctccttgtctttagccaagagtgtttctaccaccaacattgctggacatttcaatgatgagtctcccctggggctgcgccggatcctctcacagtccacagactccctcaacatgcggaaccgaaccctatccgtggaatccctcattgacgaagcagaggtaatctacagtgagctgatgagtgactttgagatggatgaaaaggactttgcagctgactcttggagtcttgctgtggacagcagcttcctgcagcagcataaaaanggaggtgatgaancagcaagatgtcatctatgaactaatccagaaagagctgcnccatgtgaggaccctgaanattatgacccgcctncttccgcncgggatgctggaaaaactacncttggaaccnggantgntcagggcctgttcccctgngtgganaantnnntganttcnataaacgctttctcagccngttntaaaanccnanccaggcctgtgnctggaaacaccgggaaatttgtnatcctcnnttggggaattnnccanaaccnttnnaggtctaangg

SEQ ID NO: 277 - DNA, 533 bp, Homo Sapiens
ctatgagaggtcgcatcaccatcaccatcacggatcctatttaggtgacactatagaatcgtcgacccacgcgtccgggggaggcggagggggatcccgcgggggcgcccgggcctcgcccgccacgcagccgccaccgctgctgccgccctcggccacgggtcccgacgcgacagtgggcgggccagcgccgaccccgctgctgcccccctcggccacagcctcggtcaagatggagccagagaacaagtacctgcccgaactcatggccgaaaaggactcgctcgacccgtccttcactcacgccatgcagctgctgacggcagaaattgagaatattcggaaaggagactcaaaaaaggatgatgaggagaattacttggatttattttctcataagaacatgaaactgaaagagcgagtgctgatacctgtcaagcagtatcccaagttcaattttgtggggaagattcttggaccacaagggaatacaatcaaaagactgcaggaagagactggtgcaaagatctctg

SEQ ID NO: 278 - DNA, 1062 bp, Homo Sapiens
  misc_feature (833)..(833): n is a, c, g, or t
  misc_feature (849)..(849): n is a, c, g, or t
  misc_feature (902)..(902): n is a, c, g, or t
  misc_feature (916)..(916): n is a, c, g, or t
  misc_feature (930)..(930): n is a, c, g, or t
  misc_feature (935)..(935): n is a, c, g, or t
  misc_feature (946)..(946): n is a, c, g, or t
  misc_feature (948)..(948): n is a, c, g, or t
  misc_feature (955)..(956): n is a, c, g, or t
  misc_feature (979)..(979): n is a, c, g, or t
  misc_feature (981)..(981): n is a, c, g, or t
  misc_feature (993)..(993): n is a, c, g, or t
  misc_feature (1001)..(1001): n is a, c, g, or t
  misc_feature (1007)..(1007): n is a, c, g, or t
  misc_feature (1019)..(1020): n is a, c, g, or t
  misc_feature (1022)..(1022): n is a, c, g, or t
  misc_feature (1027)..(1028): n is a, c, g, or t
  misc_feature (1039)..(1039): n is a, c, g, or t
  misc_feature (1041)..(1041): n is a, c, g, or t
  misc_feature (1043)..(1043): n is a, c, g, or t
  misc_feature (1046)..(1046): n is a, c, g, or t
  misc_feature (1048)..(1049): n is a, c, g, or t
  misc_feature (1055)..(1055): n is a, c, g, or t
  misc_feature (1058)..(1058): n is a, c, g, or t
agaaattaactatgagaggatcgcatcaccatcaccatcacggatcctatttaggtgacactatagaatcgtcgacccacgcgtccgcccacgcgtccgaggttcgcctgcagtctcagcggccctccatggccagcgagctgatgccttcctccagactgtggagcctctcctataccaaattgccctcctctctccaatccacagggaagtgcctcctgtattgcaatggtgtcctggagcctctgtacctgtgcccaaatggtgcccgctgtgccacctggtttcaagaccctacccgcttcactggcaccatggatgccttcgtgaagatcgtgaggcacgagggcaccaggaccctctggagcggcctccccgccaccctggtgatgactgtgccagctaccgccatctacttcactgcctatgaccaactgaaggccttcctgtgtggtcgagccctgacctctgacctctacgcacccatggtggctggcgcgctggcccgcctgggcaccgtgactgtgatcagccccctggagcttatgcggacaaagctgcaggctcagcatgtgtcgtaccgggagctgggtgcctgtgttcgaactgcagtggctcagggtggctggcgctcactgtggctgggctggggccccactgcccttcgagatgtgcccttctcagccctgtactggttcaactatgagctggtgaagagctggctcaatgggttcaggccgaaggaccagacttctgtgggcatgagctttgtggctggtggcatctcagggacggtggctgcagtgctgactctaccctttgacgtggtaaanacccaacgccaggtcnctctgggaacgatggaagctgtgaaaatgaaccccctgcatgtggactccacntggctgctgctgcngaagatccgggccnaatcnggcaccaaggnantctttgnnggtttcttcctcggatcatcaangntgccccctctgngccatcangatcancacctatgaatnngnaaaanntttttccaaangntnaanannaacggnttntggg

SEQ ID NO: 279 - DNA, 1213 bp, Homo Sapiens
  misc_feature (1)..(1): n is a, c, g, or t
  misc_feature (899)..(899): n is a, c, g, or t
  misc_feature (908)..(908): n is a, c, g, or t
  misc_feature (929)..(929): n is a, c, g, or t
  misc_feature (931)..(931): n is a, c, g, or t
  misc_feature (950)..(950): n is a, c, g, or t
  misc_feature (957)..(957): n is a, c, g, or t
  misc_feature (965)..(965): n is a, c, g, or t
  misc_feature (971)..(971): n is a, c, g, or t
  misc_feature (1015)..(1015): n is a, c, g, or t
  misc_feature (1019)..(1019): n is a, c, g, or t
  misc_feature (1050)..(1050): n is a, c, g, or t
  misc_feature (1056)..(1056): n is a, c, g, or t
  misc_feature (1061)..(1061): n is a, c, g, or t
  misc_feature (1085)..(1085): n is a, c, g, or t
  misc_feature (1120)..(1120): n is a, c, g, or t
  misc_feature (1123)..(1123): n is a, c, g, or t
  misc_feature (1128)..(1128): n is a, c, g, or t
  misc_feature (1130)..(1131): n is a, c, g, or t
  misc_feature (1136)..(1136): n is a, c, g, or t
  misc_feature (1146)..(1146): n is a, c, g, or t
  misc_feature (1149)..(1149): n is a, c, g, or t
  misc_feature (1152)..(1152): n is a, c, g, or t
  misc_feature (1154)..(1154): n is a, c, g, or t
  misc_feature (1178)..(1179): n is a, c, g, or t
  misc_feature (1191)..(1191): n is a, c, g, or t
  misc_feature (1193)..(1194): n is a, c, g, or t
  misc_feature (1197)..(1197): n is a, c, g, or t
  misc_feature (1199)..(1199): n is a, c, g, or t
  misc_feature (1212)..(1212): n is a, c, g, or t
naattagagaaattactatgagaggatcgcatcaccatcaccatcacggatcctatttaggtgacactatagaatcgtcgacccacgcgtccggaactgagctcgccaagaagcggctggcagaaacacaggaggaaatcagtgcggaagtttctgcaaaggcagaaaaagtacatgagttaaatgaagaaataggaaaactccttgctaaagccgaacagctaggggctgaaggtaatgtggatgaatcccagaagattcttatggaagtggaaaaagttcgtgcgaagaaaaaagaagctgaggaagaatacagaaattccatgcctgcatccagttttcagcagcaaaagctgcgtgtctgcgaggtctgttcagcctaccttggtctccatgacaatgaccgtcgcctggcagaccacttcggtggcaagttacacttggggttcattcagatccgagagaagcttgatcagttgaggaaaactgtcgctgaaaagcaggagaagagaaatcaggatcgcttgaggaggagagaggagagggaacgggaggagcgtctgagcaggaggtcgggatcaagaaccagagatcgcaggaggtcacgctcccgggatcggcgtcggaggcggtcaagatctacctcccgagagcgacggaaattgtcccggtcccggtcccgagatagacatcggcgccaccgcagccgttcccggagccacagccggggacatcgtcgggcttcccgggaccgaagtgcgaaatacaagtaactactctgactccttcggtagctgcaaccaggagtgagcccttctctgtgttcccagggtctgctgagggccgtgtctggtggggatggggctgggctcaccctcaggagtagggctggggagtcntgaacgggnactcaggtgtgggaaaaagcnanagggctgtggaggaactcncacggcnccaggtgnatgggnctgcacaggcactgtcccctgcctgcgtcctgggggcctgtgcnctgnttgcgtccatgccccaaagtggctgaaactngtgtcntgacnagccccggcttaccccggtttggntttggtttttgaaattttttttccatggggttttnccnaaggncnngttcngggcaaaaanggntgnantcccccttgcccggtttagtttannggggaaggcccncnnttntnaaaatcttccccna

SEQ ID NO: 280 - DNA, 1135 bp, Homo Sapiens
  misc_feature (822)..(822): n is a, c, g, or t
  misc_feature (838)..(838): n is a, c, g, or t
  misc_feature (848)..(848): n is a, c, g, or t
  misc_feature (860)..(860): n is a, c, g, or t
  misc_feature (926)..(926): n is a, c, g, or t
  misc_feature (958)..(958): n is a, c, g, or t
  misc_feature (974)..(974): n is a, c, g, or t
  misc_feature (978)..(978): n is a, c, g, or t
  misc_feature (982)..(982): n is a, c, g, or t
  misc_feature (986)..(986): n is a, c, g, or t
  misc_feature (991)..(991): n is a, c, g, or t
  misc_feature (996)..(996): n is a, c, g, or t
  misc_feature (1010)..(1010): n is a, c, g, or t
  misc_feature (1013)..(1014): n is a, c, g, or t
  misc_feature (1020)..(1021): n is a, c, g, or t
  misc_feature (1035)..(1036): n is a, c, g, or t
  misc_feature (1045)..(1045): n is a, c, g, or t
  misc_feature (1057)..(1057): n is a, c, g, or t
  misc_feature (1059)..(1059): n is a, c, g, or t
  misc_feature (1071)..(1071): n is a, c, g, or t
  misc_feature (1075)..(1075): n is a, c, g, or t
  misc_feature (1078)..(1078): n is a, c, g, or t
  misc_feature (1081)..(1082): n is a, c, g, or t
  misc_feature (1087)..(1087): n is a, c, g, or t
  misc_feature (1089)..(1089): n is a, c, g, or t
  misc_feature (1097)..(1097): n is a, c, g, or t
  misc_feature (1118)..(1118): n is a, c, g, or t
  misc_feature (1135)..(1135): n is a, c, g, or t
tagagaaattactatgagaggatcgcatcaccatcaccatcacggatcctatttaggtgacactatagaatcgtcgacccacgcgtccgggagagcggggagttgtgtccaccttgccgacgtcgctagccgtggggctgtcctgggaaggcggacggcgagcgcccggtgtccgcactcggccgcctgccgtgcccgtctgcgcccgtgtcatcctcactcgggacgcagggaccgtttttaaatcacaggggcgtgtgtcagcctgccctaggacttcatgtctatatatttccccattcactgccccgactatctgagatcggccaagatgactgaggtgatgatgaacacccagcccatggaggagatcggcctcagcccccgcaaggatggcctttcctaccagatcttcccagacccgtcagattttgaccgctgctgcaaactgaaggaccgtctgccctccatagtggtggaacccacagaaggggaggtggagagcggggagctccggtggccccctgaggagttcctggtccaggaggatgagcaagataactgcgaagagacagcgaaagaaaataaagagcagtagagtccctgtggactcccatgggtcataccagccagcatctgttcctgaactgtgtttttcccatcatgacggaagaagagagtgagccgcaattgttctgaaaatgtcaaacgaggcttctgttttgcacctgcagatcaccgagttggttttcttttcttttcttgcctttttttttttttgaaatttgccgagcagtggagccctctgacaatttgcaaggncctctgaaaaaggaanctgcttaaanccagggggttantgggtgaagggaaccagtgctgtttttgaaatcattatctgaactcaggcagcctaataaaggcantggtgggattccaatgggtcttggtgggtggnaagtggggcatgtgcnaaancaancaangaaanatttnggggtaaaaaaacnaanntgaggnnaaaaaaaaaaaaanntgttttttnaaaaaaaatttnancaaaaaaattgnaccnagnatnncctcnanaaaaattnccttctgggtggtgggaaatnaaaaaaaaaaatctttn

SEQ ID NO: 281 - DNA, 966 bp, Homo Sapiens
  misc_feature (536)..(536): n is a, c, g, or t
  misc_feature (599)..(599): n is a, c, g, or t
  misc_feature (606)..(606): n is a, c, g, or t
  misc_feature (628)..(629): n is a, c, g, or t
  misc_feature (640)..(640): n is a, c, g, or t
  misc_feature (657)..(657): n is a, c, g, or t
  misc_feature (675)..(675): n is a, c, g, or t
  misc_feature (684)..(684): n is a, c, g, or t
  misc_feature (699)..(699): n is a, c, g, or t
  misc_feature (717)..(717): n is a, c, g, or t
  misc_feature (756)..(756): n is a, c, g, or t
  misc_feature (767)..(767): n is a, c, g, or t
  misc_feature (792)..(792): n is a, c, g, or t
  misc_feature (794)..(794): n is a, c, g, or t
  misc_feature (800)..(800): n is a, c, g, or t
  misc_feature (811)..(811): n is a, c, g, or t
  misc_feature (818)..(818): n is a, c, g, or t
  misc_feature (823)..(823): n is a, c, g, or t
  misc_feature (831)..(831): n is a, c, g, or t
  misc_feature (834)..(834): n is a, c, g, or t
  misc_feature (836)..(836): n is a, c, g, or t
  misc_feature (850)..(850): n is a, c, g, or t
  misc_feature (857)..(857): n is a, c, g, or t
  misc_feature (868)..(869): n is a, c, g, or t
  misc_feature (872)..(872): n is a, c, g, or t
  misc_feature (875)..(875): n is a, c, g, or t
  misc_feature (883)..(884): n is a, c, g, or t
  misc_feature (886)..(887): n is a, c, g, or t
  misc_feature (895)..(897): n is a, c, g, or t
  misc_feature (902)..(902): n is a, c, g, or t
  misc_feature (904)..(904): n is a, c, g, or t
  misc_feature (912)..(912): n is a, c, g, or t
  misc_feature (926)..(926): n is a, c, g, or t
  misc_feature (934)..(934): n is a, c, g, or t
  misc_feature (938)..(938): n is a, c, g, or t
  misc_feature (943)..(943): n is a, c, g, or t
  misc_feature (957)..(957): n is a, c, g, or t
  misc_feature (959)..(959): n is a, c, g, or t
attagaggagaattactatgagaggatcgcatcaccattcaccatcacggatcctatttaggtgacactatagaatcgtcgacccacgcgtccgatgtgctcccctgcacctctggggtgcagaaacctcttgcctccagatttgggtggagcctctgtgggaaccataggaagtgtgtgggctgccttcctgggcaagtatttcccagtgggaagttggagggggctttaacaaagttttactccctcccctgttcccctgatctagtgctcaggacccttcaccatcaggaattccttcctgtcatctaacctcagtcctgcctactgcagttccagccaacctgctctttcctgagttcaaagcaggtggagactggctggttaccatctttgcactggcccttcggagattcggggactcagttctggtggggtcaccctccctgtcctcccgcctgtgggagggagggagggctggctcaggcatcgtctcccgcaatgggcagagagagcatagacaggtggaccaacanacagctggcccctggaggcagaaaggcccttctaacttccagattgtatgcttgagtgatggntccccancccaagcccacttttccctcanntcacccttcancctgttccttcttgccntgaccccagcccgtgcanctgctctantccaggaatggatgnggggaactcttcctgggnttctgggctcctgcataacttcaccctcacctcaatcangaagcctcaantggcctaaaatctgggggcaaagcnancacacnggctgcaaaangggacancccanccccttcntantnttggaaagggcccntgcaaancctctgatccnntgnccnaaccctcnntnntccttccnnnaagtntncaaaaganaaaacccaaagaanatcccacngaanaaaanaaaaaaaaaggctntnattgagc

SEQ ID NO: 282 - DNA, 899 bp, Homo Sapiens
  misc_feature (875)..(875): n is a, c, g, or t
  misc_feature (877)..(899): n is a, c, g, or t
attagagaaaattactatgagaggatcgcatcaccatcaccatcacggatcctatttaggtgacactatagaatcgtcgacccacgcgtccgcgctgatgaagaatgtggctcacatgaccaaagaccacagtttctttattcctgatatagaatatctttcagatattaagggactgattaaatacttgggagagaaagttggtgttggcaagatttgcttgtggtgcaacgagaaagggaagtccttctactccacagaagctgtacaggcacatatgaatgacaaaagccactgtaagctcttcacagatggcgatgctgctttggaatttgcagacttctatgattttaggagtagctatccagatcacaaggaaggggaggaccccaataaggctgaggagttgccctcagaaaagaacttggaatatgatgatgaaaccatggaattgattctgccttctggtgccagagtgggtcatcgctccttgatgagatactacaaacagcgatttggcttgtcaagagctgtggcagttgccaaaaatcggaaggccgtgggccgagtacttcagcagtacagagccctgggatggactggcagcacaggagcggctcttatgcgagagcgagacatgcagtatgtccaaaggatgaaatcaaaatggatgctgaagacaggaatgaagaacaatgccaccaagcagatgcactttcgggtccaagtgagattctgagagtctgctgggattgagcaatcatctcctgcccaagtttcctccttgccctgaggaccagtgaaagacagatcataggagagacccttttgctgctacttcattcgttctgacctaataataaaagttagaaccntnnnnnnnnnnnnnnnnnnnnnnn

SEQ ID NO: 283 - DNA, 1070 bp, Homo Sapiens
  misc_feature (2)..(2): n is a, c, g, or t
  misc_feature (799)..(799): n is a, c, g, or t
  misc_feature (829)..(829): n is a, c, g, or t
  misc_feature (832)..(832): n is a, c, g, or t
  misc_feature (834)..(834): n is a, c, g, or t
  misc_feature (844)..(844): n is a, c, g, or t
  misc_feature (849)..(849): n is a, c, g, or t
  misc_feature (854)..(854): n is a, c, g, or t
  misc_feature (857)..(857): n is a, c, g, or t
  misc_feature (877)..(877): n is a, c, g, or t
  misc_feature (903)..(903): n is a, c, g, or t
  misc_feature (905)..(905): n is a, c, g, or t
  misc_feature (913)..(913): n is a, c, g, or t
  misc_feature (915)..(915): n is a, c, g, or t
  misc_feature (919)..(919): n is a, c, g, or t
  misc_feature (939)..(939): n is a, c, g, or t
  misc_feature (944)..(944): n is a, c, g, or t
  misc_feature (948)..(948): n is a, c, g, or t
  misc_feature (951)..(951): n is a, c, g, or t
  misc_feature (957)..(957): n is a, c, g, or t
  misc_feature (959)..(959): n is a, c, g, or t
  misc_feature (961)..(961): n is a, c, g, or t
  misc_feature (974)..(974): n is a, c, g, or t
  misc_feature (998)..(998): n is a, c, g, or t
  misc_feature (1005)..(1005): n is a, c, g, or t
  misc_feature (1010)..(1011): n is a, c, g, or t
  misc_feature (1018)..(1018): n is a, c, g, or t
  misc_feature (1023)..(1023): n is a, c, g, or t
  misc_feature (1026)..(1026): n is a, c, g, or t
  misc_feature (1033)..(1035): n is a, c, g, or t
  misc_feature (1038)..(1038): n is a, c, g, or t
  misc_feature (1054)..(1054): n is a, c, g, or t
  misc_feature (1056)..(1056): n is a, c, g, or t
  misc_feature (1066)..(1066): n is a, c, g, or t
anttagagaaattactatgagaggatcgcatcaccatcaccatcacggatcctatttaggtgacactatagaatcgtcgacccacgcgtccgcccacgcgtccgcccacgcgtccgcggacgcgtgggcgcagttcctcagagagctgttccctgtgctgcagaaacgcctgtgccacccctgctgggaggtgagggactccgccctcgagttcctgacccagctgagcaggcactggggaggacaggctgacttcagatgcgcactcttggcttcagaggtgcctcagctggccctgcagctcctccaggaccctgagagttatgtccgagcgagtgcagtgaccgccatggggcagctgtccagccagggcctgcacgcccccaccagccctgagcatgcagaggcccggcagagcctgttcctggagctcctgcacatcctctccgtagactcggagggcttcccacggcgggcggtcatgcaagtcttcactgagtggctgcgggacggccacgccgacgcggcccaggacacggagcagttcgtggccactgtgctgcaggcggcgagccgggacctggactgggaggtccgcgcccagggcctggagctggccctcgtgttcctgggccagactttggggccgccgcgtacccactgcccctatgccgtggccctacccgaggtggccccagcccagccactcaccgaggcactgagggctctctgccacgtggggctctttgacttcgccttttgtgccttgtttgactgcgaccgccctgtggcgcaaaantcttgtgacctccttctcttcctgaagganaanantgcttcctanagcancctgnggnaggccaggggcaaccccaanactgcttctgcaaaaggccaccctgncnaagtggcngncggntgaacaagcccaacccccangggancaanaancctgangntntgcttggccaagnttcagttccctaaaacttgaaggnctggggnaacannctggccnaaaanaancaaccannnggnaaaaaaaattccccantncccttcctgnaaga

SEQ ID NO: 284 - DNA, 917 bp, Homo Sapiens
  misc_feature (419)..(419): n is a, c, g, or t
  misc_feature (705)..(705): n is a, c, g, or t
  misc_feature (781)..(781): n is a, c, g, or t
  misc_feature (806)..(806): n is a, c, g, or t
  misc_feature (823)..(823): n is a, c, g, or t
  misc_feature (835)..(835): n is a, c, g, or t
  misc_feature (874)..(874): n is a, c, g, or t
  misc_feature (917)..(917): n is a, c, g, or t
aatagagaaattactatgagaggatcgcatcaccatcaccatcacggatcctatttaggtgacactatagaatcgtcgacccacgcgtccgagctctggtgtgggcggcctccgctatggctgcgctgcgaaggctcttgtggccgccaccccgggtgtctcctccactctgcgctcaccagcccctccttgggccgtgggggcggcctgcggtgaccaccctgggccttcctggccggcccttctcctcccgagaggatgaggagagggctgtggcggaggcggcatggaggcggcggcggcgctggggggagctgagcgtggcggcggcggccggcggggggctggtcggcctggtatgctaccagctgtacggggaccccagggccggctcgccggcgaccgggcgaccctcaaanagcgcggccacggagcccgaggacccgccccgcggccgggggatgctgcccatcccagtggcggctgccaaggagacggttgctattggcagaacagacattgaagacttagacctttatgccacatctcgggagaggcgatttcgtttatttgcttctataaaatgtgaagggcagttattcatgactccgtatgattttattttggctgttacaacagatgagcccaaagttgccaaaacttggaagtcactttccaaacaggaattaaatcaaatgctcgcanaaacaccaccagtttggaaaggctcatcgaagctatttcgaaatcttaaaaaaaaaaggtgtgatttcttacacanaatatctttttcttttatgtatttnaacaaagccacatgcanggttcaaaatanctttcaacatgtttgaaaactgatgggcaatgaaaatgntggataaaaaaaaatttttggtgcttcaaaaaaatatttcagn

SEQ ID NO: 285 - DNA, 1086 bp, Homo Sapiens
  misc_feature (1)..(1): n is a, c, g, or t
  misc_feature (308)..(308): n is a, c, g, or t
  misc_feature (723)..(723): n is a, c, g, or t
  misc_feature (767)..(767): n is a, c, g, or t
  misc_feature (834)..(834): n is a, c, g, or t
  misc_feature (853)..(853): n is a, c, g, or t
  misc_feature (855)..(855): n is a, c, g, or t
  misc_feature (869)..(869): n is a, c, g, or t
  misc_feature (872)..(872): n is a, c, g, or t
  misc_feature (896)..(896): n is a, c, g, or t
  misc_feature (899)..(899): n is a, c, g, or t
  misc_feature (901)..(901): n is a, c, g, or t
  misc_feature (909)..(909): n is a, c, g, or t
  misc_feature (918)..(918): n is a, c, g, or t
  misc_feature (922)..(922): n is a, c, g, or t
  misc_feature (925)..(925): n is a, c, g, or t
  misc_feature (938)..(938): n is a, c, g, or t
  misc_feature (969)..(969): n is a, c, g, or t
  misc_feature (976)..(976): n is a, c, g, or t
  misc_feature (979)..(979): n is a, c, g, or t
  misc_feature (987)..(987): n is a, c, g, or t
  misc_feature (990)..(990): n is a, c, g, or t
  misc_feature (997)..(997): n is a, c, g, or t
  misc_feature (999)..(999): n is a, c, g, or t
  misc_feature (1012)..(1012): n is a, c, g, or t
  misc_feature (1017)..(1017): n is a, c, g, or t
  misc_feature (1023)..(1024): n is a, c, g, or t
  misc_feature (1027)..(1027): n is a, c, g, or t
  misc_feature (1029)..(1029): n is a, c, g, or t
  misc_feature (1039)..(1039): n is a, c, g, or t
  misc_feature (1046)..(1047): n is a, c, g, or t
  misc_feature (1060)..(1060): n is a, c, g, or t
  misc_feature (1062)..(1062): n is a, c, g, or t
  misc_feature (1066)..(1066): n is a, c, g, or t
  misc_feature (1073)..(1073): n is a, c, g, or t
  misc_feature (1077)..(1077): n is a, c, g, or t
  misc_feature (1080)..(1080): n is a, c, g, or t
  misc_feature (1085)..(1085): n is a, c, g, or t
naattagagaaattaactatgagaggatcgcatcaccatcaccatcacggatcctatttaggtgacactatagaatcgtcgacccacgcgtccggagctcgggacgtgatcgtgggcgcgcagccagcggctccctgcccttcccctccgggccctgagtaccggccccccaccaaggaggagcccgaggtctccgtcccggcggcgatgctgccccgtcggcctctggcgtggcccgcgtggctgttgcggggtgctccgggagccgcgggttcttggggtcggccggttggccccctggcccgcanaggctgctgctccgccccggggacccccgaggtgccgctgacccgggagcgctaccccgtgcggcgcttgccgttctccacggtgtctaagcaggacctggccgcctttgagcgcatcgtgcccggcggggtcgtcacggacccggaagcgctgcaggctcccaacgtggactggttgcggacgctgcgaggctgtagcaaggtgctgctgaggccacggacgtcggaggaggtgtcccacatcctcaggcactgccacgagaggaacctggccgtgaacccacaggggggcaacacaggcatggtgggtggcagcgtccccgtctttgacgagatcatcctctccactgcccgcatgaaccgggtcctcagcttccacagcgtgtctggcgggctgcgtcctggaggagctganccggtatgtggaggaacgggacttcatcatgccgctggacttangagccaagggcagctgccacatcgggggaaacgtggcaaccaacgctggaggcctgcggtttcttcnatatggctcactgcatggnantgtcctgggcctgnaantggtgctggccgaaggcactgtcntgnantgcctganctccctgangaanganaacacgggctatnactgaaacaactgttcatcgggtcgaaggantttgggnatnatcaccanggngtccatntngtgtccaccaaancccanggttgnnaangnggttttctcntcactgnntgcccccccctgngntctnggaaccnaagnaanccggnt

SEQ ID NO: 286 - DNA, 1179 bp, Homo Sapiens
  misc_feature (1)..(1): n is a, c, g, or t
  misc_feature (870)..(870): n is a, c, g, or t
  misc_feature (882)..(882): n is a, c, g, or t
  misc_feature (910)..(910): n is a, c, g, or t
  misc_feature (914)..(914): n is a, c, g, or t
  misc_feature (937)..(937): n is a, c, g, or t
  misc_feature (945)..(945): n is a, c, g, or t
  misc_feature (962)..(962): n is a, c, g, or t
  misc_feature (977)..(977): n is a, c, g, or t
  misc_feature (980)..(980): n is a, c, g, or t
  misc_feature (985)..(985): n is a, c, g, or t
  misc_feature (1006)..(1006): n is a, c, g, or t
  misc_feature (1011)..(1011): n is a, c, g, or t
  misc_feature (1016)..(1016): n is a, c, g, or t
  misc_feature (1023)..(1023): n is a, c, g, or t
  misc_feature (1025)..(1025): n is a, c, g, or t
  misc_feature (1039)..(1039): n is a, c, g, or t
  misc_feature (1050)..(1050): n is a, c, g, or t
  misc_feature (1052)..(1053): n is a, c, g, or t
  misc_feature (1060)..(1060): n is a, c, g, or t
  misc_feature (1062)..(1062): n is a, c, g, or t
  misc_feature (1065)..(1065): n is a, c, g, or t
  misc_feature (1071)..(1071): n is a, c, g, or t
  misc_feature (1073)..(1073): n is a, c, g, or t
  misc_feature (1085)..(1085): n is a, c, g, or t
  misc_feature (1087)..(1087): n is a, c, g, or t
  misc_feature (1091)..(1092): n is a, c, g, or t
  misc_feature (1097)..(1097): n is a, c, g, or t
  misc_feature (1104)..(1104): n is a, c, g, or t
  misc_feature (1107)..(1107): n is a, c, g, or t
  misc_feature (1112)..(1112): n is a, c, g, or t
  misc_feature (1131)..(1132): n is a, c, g, or t
  misc_feature (1136)..(1136): n is a, c, g, or t
  misc_feature (1144)..(1144): n is a, c, g, or t
  misc_feature (1151)..(1151): n is a, c, g, or t
  misc_feature (1160)..(1160): n is a, c, g, or t
  misc_feature (1170)..(1171): n is a, c, g, or t
naattagagaaattactatgagaggatcgcatcaccatcaccatcacggatcctatttaggtgacactatagaatcgtcgacccacgcgtccgcgtatgttcactcgtctgccaccatcccattggatgaccccactttgctctttgccaatgcaggcatgaaccagtttaaacccattttcctgaacacaattgacccatctcaccccatggcaaagctgagcagagctgccaatacccagaagtgcatccgggctgggggcaaacataatgacctggacgatgtgggcaaggatgtctatcatcacaccttcttcgagatgctgggctcttggtcttttggagattactttaaggaattggcatgtaagatggctctggaactcctcacccaagagtttggcattcccattgaaagactttatgttacttactttggcggggatgaagcagctggcttagaagcagatctggaatgcaaacagatctggcaaaatttggggctggatgacaccaaaatcctcccaggcaacatgaaggataacttctgggagatgggtgacacgggcccctgtggtccttgcagtgagatccactacgaccggattggtggtcgggacgccgcacatcttgtcaaccaggacgaccctaatgtgctggagatctggaaccttgtgttcatccagtataacagggaagctgatggcattctgaaacctcttcccaagaaaagcattgacacagggatgggcctggaacgactggtatctgtgctgcagaataagatgtccaactatgacactgacctttttgtcccttactttgaagccattcagaagggcacaggtgcccgaccatacactgggaaangttggtgctgangatgccgatgggattgacatggcctacngggngctggctgaaccatgctcggaanatcactgngggcactggctgatggnggccggcctgacacncanggcgnggaaatgtgttgaaacgaatnctccnccganctgtccnanacccccatgaaaanctcaatgccancnnggggctncnttngctacntnaggggaggttgncncccnnccccngggaaangcntttcntgacctgaaaaaggacccnnaacntggggganggaattntttatgganaaaagggggnntttcccaa

SEQ ID NO: 287 - DNA, 1166 bp, Homo Sapiens
  misc_feature (1)..(1): n is a, c, g, or t
  misc_feature (890)..(890): n is a, c, g, or t
  misc_feature (894)..(894): n is a, c, g, or t
  misc_feature (904)..(904): n is a, c, g, or t
  misc_feature (976)..(976): n is a, c, g, or t
  misc_feature (1001)..(1001): n is a, c, g, or t
  misc_feature (1018)..(1018): n is a, c, g, or t
  misc_feature (1022)..(1022): n is a, c, g, or t
  misc_feature (1038)..(1038): n is a, c, g, or t
  misc_feature (1042)..(1042): n is a, c, g, or t
  misc_feature (1057)..(1057): n is a, c, g, or t
  misc_feature (1059)..(1059): n is a, c, g, or t
  misc_feature (1065)..(1065): n is a, c, g, or t
  misc_feature (1078)..(1078): n is a, c, g, or t
  misc_feature (1081)..(1081): n is a, c, g, or t
  misc_feature (1083)..(1083): n is a, c, g, or t
  misc_feature (1086)..(1086): n is a, c, g, or t
  misc_feature (1089)..(1089): n is a, c, g, or t
  misc_feature (1093)..(1094): n is a, c, g, or t
  misc_feature (1101)..(1101): n is a, c, g, or t
  misc_feature (1106)..(1106): n is a, c, g, or t
  misc_feature (1121)..(1122): n is a, c, g, or t
  misc_feature (1128)..(1128): n is a, c, g, or t
  misc_feature (1131)..(1131): n is a, c, g, or t
  misc_feature (1134)..(1134): n is a, c, g, or t
naaatagagaaattactatgagaggatcgcatcaccatcaccatcacggatcctatttaggtgacactatagaatcgtcgacccacgcgtccgcccacgcgtccggagtggtttttcggatcatgtctggtggctccgcggattataacagcagagaacatggcggcccagagggaatggaccccgatggtgtcatcgagagcaactggaatgagattgttgataactttgatgatatgaatttaaaggagtctctccttcgtggcatctatgcttacggttttgagaagccttccgctattcagcagagagctattattccctgtattaaagggtatgatgtgattgctcaagctcagtcaggtactggcaagacagccacatttgctatttccatcctgcaacagttggagattgagttcaaggagacccaagcactagtattggcccccaccagagaactggctcaacagatccaaaaggtaattctggcacttggagactatatgggagccacttgtcatgcctgcattggtggaacaaatgttcgaaatgaaatgcaaaaactgcaggctgaagcaccacatattgttgttggtacacccgggagagtgtttgatatgttaaacagaagatacctttctccaaaatggatcaaaatgtttgttttggatgaagcagatgaaatgttgagccgtggttttaaggatcaaatctatgagattttccaaaaactaaacacaagtattcaggttgtgttgctttctgccacaatgccaactgatgtgttggaagtgaccaaaaaattcatgagagatccaattcgaattctggtgaaaaaggaagaattgacccttgaaggaatcaaacagttttatattaatgttganaganagaatggaanttggatacacttttgtgacttgtacgagacactgaccattacacaggctgttatttttctcaatacaaggcncagggggactggctgactgaaaaangcatgccaaaaacttcncagnttctgctctgcctggngacntggaccaaaagaaananatgttntcttgagggaatnccngnccnggncaanncgggttngatcnctactgacttgtggnncccggnatnaantgcaaaaagggctttggttaaaataagatcca

SEQ ID NO: 288 - DNA, 1214 bp, Homo Sapiens
  misc_feature (901)..(901): n is a, c, g, or t
  misc_feature (942)..(942): n is a, c, g, or t
  misc_feature (965)..(965): n is a, c, g, or t
  misc_feature (978)..(978): n is a, c, g, or t
  misc_feature (982)..(982): n is a, c, g, or t
  misc_feature (1003)..(1003): n is a, c, g, or t
  misc_feature (1016)..(1016): n is a, c, g, or t
  misc_feature (1018)..(1018): n is a, c, g, or t
  misc_feature (1026)..(1026): n is a, c, g, or t
  misc_feature (1032)..(1032): n is a, c, g, or t
  misc_feature (1038)..(1038): n is a, c, g, or t
  misc_feature (1060)..(1060): n is a, c, g, or t
  misc_feature (1072)..(1072): n is a, c, g, or t
  misc_feature (1079)..(1079): n is a, c, g, or t
  misc_feature (1083)..(1084): n is a, c, g, or t
  misc_feature (1086)..(1086): n is a, c, g, or t
  misc_feature (1093)..(1095): n is a, c, g, or t
  misc_feature (1105)..(1105): n is a, c, g, or t
  misc_feature (1108)..(1109): n is a, c, g, or t
  misc_feature (1111)..(1111): n is a, c, g, or t
  misc_feature (1117)..(1117): n is a, c, g, or t
  misc_feature (1121)..(1121): n is a, c, g, or t
  misc_feature (1132)..(1132): n is a, c, g, or t
  misc_feature (1140)..(1141): n is a, c, g, or t
  misc_feature (1152)..(1152): n is a, c, g, or t
  misc_feature (1155)..(1155): n is a, c, g, or t
  misc_feature (1161)..(1161): n is a, c, g, or t
  misc_feature (1172)..(1172): n is a, c, g, or t
  misc_feature (1177)..(1177): n is a, c, g, or t
  misc_feature (1183)..(1183): n is a, c, g, or t
  misc_feature (1185)..(1185): n is a, c, g, or t
  misc_feature (1194)..(1194): n is a, c, g, or t
  misc_feature (1198)..(1198): n is a, c, g, or t
  misc_feature (1204)..(1204): n is a, c, g, or t
  misc_feature (1210)..(1210): n is a, c, g, or t
gagaaattactatgagaggatcgcatcaccatcaccatcacggatcctatttaggtgacactatagaatcgtcgacccacgcgtccgaacaggtttacaaaaaagtggaagaaaaagtgcgaaagcagactaaaggcctttatcctgcacctctgaaaataattgatgtggtaaagactggaattgagcaagggagtgatgccggttatctctgtgaatctcagaaatttggagagcttgtaatgaccaaagaatcaaaggccttgatgggactctaccatggtcaggtcctgtgcaagaagaataaatttggagctccacagaaggatgttaagcatctggctattcttggtgcagggctgatgggagcaggcatcgcccaagtctccgtggataaggggctaaagactatacttaaagatgccaccctcactgcgctagaccgaggacagcaacaagtgttcaaaggattgaatgacaaagtgaagaagaaagctctaacatcatttgaaagggattccatcttcagcaacttgactgggcagcttgattaccaaggttttgaaaaggccgacatggtgattgaagctgtgtttgaggaccttagtcttaagcacagagtgctaaaggaagtagaagcggtgattccagatcactgtatctttgccagtaacacatctgctctcccaatcagtgaaatcgctgctgtcagcaaaagacctgagaaggtgattggcatgcactacttctctcccgtggacaagatgcagctgctggagattatcacgaccgagaaaacttccaaagacaccagtgcttcagctgtagcagttggtctcaagcaggggaaggtcatcattgtggttaaggatggacctggcttctatactaccaggtgtcnttgcgcccatgatgtctgaagttcatcccgaatcctccagnaaaggagttgaacccgaaaaaanctggattccctgnaccncaagcttttggctttccctgnggggtgccccccncnctggtggnatgaanttgggntggaatgtaacccaaaacatgngggcggaaaatntggggcnaaanncnttggggnnncggtttgggnagnngnaacccnaaanctgctgaaccnaaaggggnnccaagggcctnccnaggccntaaatcctggnaaggncttttncntcctttccnggangggggnaaaaanaaag

SEQ ID NO: 289 - DNA, 1199 bp, Homo Sapiens
  misc_feature (2)..(2): n is a, c, g, or t
  misc_feature (844)..(844): n is a, c, g, or t
  misc_feature (862)..(862): n is a, c, g, or t
  misc_feature (870)..(870): n is a, c, g, or t
  misc_feature (886)..(886): n is a, c, g, or t
  misc_feature (888)..(888): n is a, c, g, or t
  misc_feature (926)..(926): n is a, c, g, or t
  misc_feature (974)..(974): n is a, c, g, or t
  misc_feature (977)..(977): n is a, c, g, or t
  misc_feature (991)..(991): n is a, c, g, or t
  misc_feature (1010)..(1010): n is a, c, g, or t
  misc_feature (1030)..(1030): n is a, c, g, or t
  misc_feature (1033)..(1033): n is a, c, g, or t
  misc_feature (1040)..(1041): n is a, c, g, or t
  misc_feature (1067)..(1067): n is a, c, g, or t
  misc_feature (1083)..(1083): n is a, c, g, or t
  misc_feature (1087)..(1087): n is a, c, g, or t
  misc_feature (1096)..(1096): n is a, c, g, or t
  misc_feature (1115)..(1115): n is a, c, g, or t
  misc_feature (1126)..(1126): n is a, c, g, or t
  misc_feature (1128)..(1129): n is a, c, g, or t
  misc_feature (1134)..(1134): n is a, c, g, or t
  misc_feature (1137)..(1138): n is a, c, g, or t
  misc_feature (1140)..(1140): n is a, c, g, or t
  misc_feature (1160)..(1160): n is a, c, g, or t
  misc_feature (1162)..(1162): n is a, c, g, or t
  misc_feature (1171)..(1171): n is a, c, g, or t
  misc_feature (1175)..(1175): n is a, c, g, or t
  misc_feature (1179)..(1179): n is a, c, g, or t
  misc_feature (1184)..(1184): n is a, c, g, or t
  misc_feature (1188)..(1189): n is a, c, g, or t
  misc_feature (1192)..(1192): n is a, c, g, or t
  misc_feature (1197)..(1197): n is a, c, g, or t
  misc_feature (1199)..(1199): n is a, c, g, or t
cnattagagaaattactatgagaggatcgcatcaccatcaccatcacggatcctatttaggtgacactatagaatcgtcgacccacgcgtccggcaggcggctcaagtggacagccgggatggcagagcgtgcggcgctggaggagctggtgaaacttcagggagagcgcgtgcgaggcctcaagcagcagaaggccagcgccgagctgatcgaggaggaggtggcgaaactcctgaaactgaaggcacagctgggtcctgatgaaagcaaacagaaatttgtgctcaaaacccccaagggcacaagagactatagtccccggcagatggcagttcgcgagaaggtgtttgacgtaatcatccgttgcttcaagcgccacggtgcagaagtcattgatacacctgtatttgaactaaaggaaacactgatgggaaagtatggggaagactccaagcttatctatgacctgaaggaccagggcggggagctcctgtcccttcgctatgacctcactgttccttttgctcggtatttggcaatgaataaactgaccaacattaaacgctaccacatagcaaaggtatatcggcgggataacccagccatgacccgtggccgataccgggaattctaccagtgtgattttgacattgctgggaactttgatcccatgatccctgatgcagagtgcctgaagatcatgtgcgagatcctgagttcacttcagataggcgacttcctggtcaaggtaaacgatcgacgcattctagatgggatgtttgctatctgtggtgtttctgacagcaagttccgtaccatctgctcctcagtaaacaagctggnacaaggtgtcctgggaanaggtgaanaatgaaatggtgggananaagggccttgcacctgaggtggctgaccgcattggggnactatgtccagcaacatggtggggtatccctggtggaacagctgctcnagnatcctaactatccnaaacaagcaggccttgganggcctggaaaacctgaaatngcnctttgannacctgaacctatttggcattgatganaaaatcccctttgacntganccttgctcnaagggctggaattactacnctggggggatntnngaggnatnntntttaaaaaccccaccccagnangggaaaaancccngggntgggncatnnggnctccngn

SEQ ID NO: 290 - DNA, 687 bp, Homo Sapiens
  misc_feature (656)..(657): n is a, c, g, or t
  misc_feature (659)..(659): n is a, c, g, or t
  misc_feature (663)..(663): n is a, c, g, or t
  misc_feature (668)..(670): n is a, c, g, or t
  misc_feature (673)..(674): n is a, c, g, or t
  misc_feature (677)..(687): n is a, c, g, or t
tagagaaattactatgagaggatcgcatcaccatcaccatcacggatcctatttaggtgacactatagaatcgtcgacccacgcgtccgcccacgcgtccgcccacgcgtccgcggacgcgtgggcggacgcgtgggaagcgaagaaggaagctcctgcccctcctaaagctgaagccaaagcgaaggctttaaaggccaagaaggcagtgttgaaaggtgtccacagccacaaaaagaagaagatccgcacgtcacccaccttccggcggccgaagacactgcgactccggagacagcccaaatatcctcggaagagcgctcccaggagaaacaagcttgaccactatgctatcatcaagtttccgctgaccactgagtctgccatgaagaagatagaagacaacaacacacttgtgttcattgtggatgttaaagccaacaagcaccagattaaacaggctgtgaagaagctgtatgacattgatgtggccaaggtcaacaccctgattcggcctgatggagagaagaaggcatatgttcgactggctcctgattacgatgctttggatgttgccaacaaaattgggatcatctaaactgagtccagctgcctaattctgaatatatatatatatatatatcttttcaccatannanaaanaaaannnaannaannnnnnnnnnn

SEQ ID NO: 291 - DNA, 558 bp, Homo Sapiens
tagagaaattactatgagaggatcgcatcaccatcaccatcacggatcctatttaggtgacactatagaatcgtcgacccacgcgtccgagatgtcgaagcgaggacgtggtgggtcctctggtgcgaaattccggatttccttgggtcttccggtaggagctgtaatcaattgtgctgacaacacaggagccaaaaacctgtatatcatctccgtgaaggggatcaagggacggctgaacagacttcccgctgctggtgtgggtgacatggtgatggccacagtcaagaaaggcaaaccagagctcagaaaaaaggtacatccagcagtggtcattcgacaacgaaagtcataccgtagaaaagatggcgtgtttctttattttgaagataatgcaggagtcatagtgaacaataaaggcgagatgaaaggttctgccattacaggaccagtagcaaaggagtgtgcagacttgtggccccggattgcatccaatgctggcagcattgcatgattctccagtatatttgtaaaaaataaaaaaaaactaaacccatt

SEQ ID NO: 292 - DNA, 930 bp, Homo Sapiens
atgagaggatcgcatcaccatcaccatcacggatcctatttaggtgacactatagaatcgtcgacccacgcgtccggcaattttgctggtgacctggtccggaacttggaaggagccaatcaacacgtttctaaggaactcctagatctggcaatgcagaatgcctggtttcggaaatctcgattcaaaggagggaaaggaaaaaagctgaacattggtggaggaggcctaggctacagggagcggcctggcctgggctctgagaacatggatcgaggaaataacaatgtaatgagcaattatgaggcctacaagccttccacaggagctatgggagatcgactaacggcaatgaaagcagctttccagtcacagtacaagagtcactttgttgcagccagtttaagtaatcagaaggctggaagttctgctgctggggcaagtgggtggactagtgcagggagcttgaattctgttccaactaactcagcacaacagggccataacagtcctgacagccccgtcaccagtgccgccaagggcatcccaggctttggcaatactggcaacatcagtggtgcccctgtgacctacccgtctgccggagcccaaggagtcaacaacacagcttcagggaataacagccgagaagggactgggggcagcaacgggaaaagagagagatatactgagaaccggggcagcagccgtcacagtcacggagagactggcaatcggcatagcgatagtccacgtcacggagatggtggtcgccatggagatggataccgccatccagaaagcagcagccgtcatactgatggccatcggcacggggagaacagacatggaggaagcgcaggccggcatgggggagaaccggggtgcaaatgatggtcggaatggggaaagcaagaagaagcttttaat

SEQ ID NO: 293 - DNA, 912 bp, Homo Sapiens
actatgagaggatcgcatcaccatcaccatcacggatcctatttaggtgacactatagaatcgtcgacccacgcgtccggtgctcctgagccctccaccatcgcccgctctctaccaaccactgtcccagagtcaccaaactaccgcaacaccaggacccctcgcactccccggacaccacagctcaaagactcaagccagacatcacggttttacccagtggtgaaagaaggacggacactggatgccaagatgcctcgaaaaagaaagacaagacacagttcaaacccacccttggagagccatgtgggctgggtgatggattcccgtgagcacaggccccgtactgcttccatcagctccagcccctcagaagggacgcctacagttggcagctatggctgtacccctcagtcattgcccaagttccagcatccttcccatgaactgctcaaggaaaatggcttcacacaacacgtctaccataagtatcgtaggcgctgccttaatgagcggaaacgcttgggcattggccagtctcaggagatgaacacactcttccgcttctggtccttcttcctccgagatcacttcaacaaaaagatgtatgaggagttcaagcagctggctctggaggacgccaaagaaggctacagatatggtttggagtgcctttttcgatactacagttatggcctggaaaagaagttccggctggacatattcaaggattttcaggaggaaacggtgaaggactatgaagctggccaactgtatgggctggagaagttctgggccttcttgaaatattccaaagccaaaaatttggacattgaccccaaactgcaagaatacctcggcaaattccgacgtcttgaagacttccgagtagatccccccatgggtgaggag

SEQ ID NO: 294 - DNA, 706 bp, Homo Sapiens
  misc_feature (660)..(661): n is a, c, g, or t
  misc_feature (663)..(664): n is a, c, g, or t
  misc_feature (679)..(679): n is a, c, g, or t
  misc_feature (683)..(683): n is a, c, g, or t
  misc_feature (685)..(685): n is a, c, g, or t
  misc_feature (687)..(701): n is a, c, g, or t
  misc_feature (703)..(706): n is a, c, g, or t
agagaaattactatgagaggatcgcatcaccatcaccatcacggatcctatttaggtgacactatagaatcgtcgacccacgcgtccgtgctgctttcctggaaagacaaacagtgccagacccaggacacccaagtactgttgagaagtgcccaggagcaccttactatgcaacgagtgaccatcaagtgcctgctgatccaccctaaccccgagtctgcactcaacgaggaggcgggccgcctgctcttggagaactacgaggagtatgcggctcgggcccgtctgctcacagagatccacgggggcgccggcgggcccagcggcagggccgaagccggtcgggccctggccagtggcactgaagcttcctccaccgaccctggggccccagggggcccgggaggggctgagggtcccatggccaagaagcatgctggcgagcgcgataagaagctggcggccaagaaaaagacggacaagaagcgggcgctgcggcggctgtagtgggctctcttcctccttccaccgtgaccccaacctctcctgtcccctccctccaactctgtctctaagttatttaaattatggctggggtcggggagggtacagggggcactgggacctggatttgtttttctaaataaagttggaaaagcnnannaaaaaaaaaaaaaanaaananannnnnnnnnnnnnnnannnn

SEQ ID NO: 295 - DNA, 1164 bp, Homo Sapiens
  misc_feature (1)..(1): n is a, c, g, or t
  misc_feature (309)..(309): n is a, c, g, or t
  misc_feature (789)..(789): n is a, c, g, or t
  misc_feature (798)..(798): n is a, c, g, or t
  misc_feature (832)..(832): n is a, c, g, or t
  misc_feature (847)..(847): n is a, c, g, or t
  misc_feature (863)..(863): n is a, c, g, or t
  misc_feature (877)..(877): n is a, c, g, or t
  misc_feature (909)..(909): n is a, c, g, or t
  misc_feature (916)..(916): n is a, c, g, or t
  misc_feature (921)..(921): n is a, c, g, or t
  misc_feature (927)..(927): n is a, c, g, or t
  misc_feature (929)..(929): n is a, c, g, or t
  misc_feature (950)..(951): n is a, c, g, or t
  misc_feature (969)..(969): n is a, c, g, or t
  misc_feature (981)..(981): n is a, c, g, or t
  misc_feature (994)..(994): n is a, c, g, or t
  misc_feature (997)..(997): n is a, c, g, or t
  misc_feature (1007)..(1008): n is a, c, g, or t
  misc_feature (1021)..(1021): n is a, c, g, or t
  misc_feature (1023)..(1024): n is a, c, g, or t
  misc_feature (1028)..(1028): n is a, c, g, or t
  misc_feature (1050)..(1050): n is a, c, g, or t
  misc_feature (1052)..(1053): n is a, c, g, or t
  misc_feature (1064)..(1064): n is a, c, g, or t
  misc_feature (1066)..(1066): n is a, c, g, or t
  misc_feature (1070)..(1070): n is a, c, g, or t
  misc_feature (1072)..(1072): n is a, c, g, or t
  misc_feature (1076)..(1076): n is a, c, g, or t
  misc_feature (1084)..(1084): n is a, c, g, or t
  misc_feature (1090)..(1090): n is a, c, g, or t
  misc_feature (1093)..(1093): n is a, c, g, or t
  misc_feature (1098)..(1098): n is a, c, g, or t
  misc_feature (1103)..(1103): n is a, c, g, or t
  misc_feature (1105)..(1105): n is a, c, g, or t
  misc_feature (1113)..(1113): n is a, c, g, or t
  misc_feature (1124)..(1124): n is a, c, g, or t
  misc_feature (1129)..(1129): n is a, c, g, or t
  misc_feature (1138)..(1140): n is a, c, g, or t
naattagagaaattactatgagaggatcgcatcaccatcaccatcacggatcctatttaggtgacactatagaatcgtcgacccacgcgtccgctttgccatcccctcgagaagtgactgttacagaacggctcctcctggatggcccaccacctcattcaccagagactcctcaatttccccccacaactggagctgtactgtacactgttaagagaaaccaggttgggcctgaggttcgctcctgccccaaggcatcccccagacttcagaaagagagggagggccaaaaggcagtgagtgagtcanaggctttgatgctggtctgggatgcatcagaaactgagaaattgcctggtaccgtggaaccccctgcttccttcctgagtcctgtttcctcaaagaccagagatgcagggagaagacatgtgtccgggaaaccagacactcaagagagatggctgccctcaagcagagctcgggtgaagacaagagacaggacgtgccctgtccatgaatctccatcaggaattgacacctcagagacttctcccaaagcccctagagggggtttggctaaagacagtggaacacaggccaagggtccagagggggagcagcagccaaaggccgcagaagctacggtgtgtgccaacaacagcaaggtcagctccactggggaaaaggttgtcctgtggacaaggtaggtaagggtggatgacgtgtgtttggaaaaagagcatagaccacatccatgtggctccctagggttaatcatgatacctgggnttacagggnaagctgaccgtgtgatcctcaccatgtgccaagnacaagggggcacagnccacagaaccttcaanatcatcttcccaancagctgggaaaataaaaaccccttgctgaggntttcccnaccgnttttcnanaaactcatgcaactctttccnnactggcctgggaaacccngctctgaagganggaaggatgatgncancccattaccnncaatggcaaaccnanntgtntggaccatgggggacctttttntnntaaaaaaaaancnggantnaaangaaaattnttgggnaantcttnttaancngggaaccnaaaccccaaanggggncccctgggnnnccgggggaaggggggaaattttaa

SEQ ID NO: 296 - DNA, 809 bp, Homo Sapiens
  misc_feature (782)..(782): n is a, c, g, or t
  misc_feature (786)..(786): n is a, c, g, or t
  misc_feature (788)..(790): n is a, c, g, or t
  misc_feature (792)..(795): n is a, c, g, or t
  misc_feature (798)..(799): n is a, c, g, or t
  misc_feature (801)..(804): n is a, c, g, or t
  misc_feature (806)..(808): n is a, c, g, or t
agagaaaattactatgagaggatcgcatcaccatcaccatcacggatcctatttaggtgacactatagaatcgtcgacccacgcgtccgctgccgcgttctacccttccggcccgtgttctatccgccgcctccaccttccatccggcgccggctttcggcgcgacggtcgccgcgttccatcgtcgcgcggcccttcgggcgcccgagcccgcaatgtcgggccccaacggagacctggggatgccggtggaggcgggagcggaaggcgaggaggacggcttcggggaagcagaatacgctgccatcaactccatgctggaccagatcaactcctgtctggaccacctggaggagaagaatgaccacctccacgcccgcctccaggagctgctggagtccaaccggcagacacgcctggagttccagcagcagctcggggaggcccccagtgatgccagcccctaggctccaagagcccccaaccgggacccaaccctgcctccctgggctaggctctggcctgggcactcaccccctggcttagacaccttctcaagggctggccttcagggacccctggtgggtctgcctgcctgggccacccttcctgcctgggcctccccttggcctacctgggccagcccccaccacctggcatgccctcctggggccaagagtgggcctgcaacccacccacttgcctgcccacccaactcctgggcgctccccactctgcccaggccttgagtgtccacattaaatgggtctcccacaaaaaanaaanannnannnnaannannnnannna

SEQ ID NO: 297 - DNA, 1061 bp, Homo Sapiens
  misc_feature (4)..(5): n is a, c, g, or t
  misc_feature (15)..(15): n is a, c, g, or t
  misc_feature (782)..(782): n is a, c, g, or t
  misc_feature (821)..(821): n is a, c, g, or t
  misc_feature (861)..(861): n is a, c, g, or t
  misc_feature (873)..(873): n is a, c, g, or t
  misc_feature (877)..(877): n is a, c, g, or t
  misc_feature (893)..(893): n is a, c, g, or t
  misc_feature (895)..(895): n is a, c, g, or t
  misc_feature (900)..(900): n is a, c, g, or t
  misc_feature (906)..(906): n is a, c, g, or t
  misc_feature (908)..(908): n is a, c, g, or t
  misc_feature (916)..(916): n is a, c, g, or t
  misc_feature (922)..(922): n is a, c, g, or t
  misc_feature (929)..(929): n is a, c, g, or t
  misc_feature (931)..(931): n is a, c, g, or t
  misc_feature (938)..(938): n is a, c, g, or t
  misc_feature (944)..(944): n is a, c, g, or t
  misc_feature (952)..(952): n is a, c, g, or t
  misc_feature (961)..(962): n is a, c, g, or t
  misc_feature (965)..(965): n is a, c, g, or t
  misc_feature (968)..(968): n is a, c, g, or t
  misc_feature (972)..(972): n is a, c, g, or t
  misc_feature (974)..(974): n is a, c, g, or t
  misc_feature (981)..(981): n is a, c, g, or t
  misc_feature (987)..(987): n is a, c, g, or t
  misc_feature (1004)..(1004): n is a, c, g, or t
  misc_feature (1006)..(1006): n is a, c, g, or t
  misc_feature (1019)..(1019): n is a, c, g, or t
  misc_feature (1023)..(1023): n is a, c, g, or t
  misc_feature (1028)..(1029): n is a, c, g, or t
  misc_feature (1047)..(1047): n is a, c, g, or t
  misc_feature (1049)..(1049): n is a, c, g, or t
  misc_feature (1058)..(1058): n is a, c, g, or t
catnnagagagaatnactatgagaggatcgcatcaccatcaccatcacggatcctatttaggtgacactatagaatcgtcgacccacgcgtccgcggcgtggagatggcgggagctggtcgcggagcagcggtgtccagggtgcaggcgggtcctgggagtccccggcgagcgcgggggcggcagcaagtgcagccgctggggaagcagcgcccagccccgtggcccgggcttcgcagcaaagagaagaagaaagtgaactgcaagcccaagaaccaggacgaacaggagattcctttccggctccgggagattatgaggagccgccaagagatgaaaaacccgatcagtaacaagaagaggaagaaagcagcccaggtgaccttcagaaagacattggagaaggaagcaaagggagaggagcccgacatcgcagtccccaagttcaaacagaggaagggggagtccgacggggcctatatccaccgcatgcagcaagaggcccagcatgtgctgttcctcagcaagaaccaggccatccggcagccagaggtgcaggcagctcccaaggagaagtctgagcagaaaaaagcaaaaaaagcgttccagaagcggcgactagataaagtccgacggaaaaaggaggaaaaggcggcagacaggctggagcaggagttgctccgagacacggtgaagtttggtgaggttgtcctgcagcccccagagctgactgccaggccccagaggagcgtaagcaaggaccagcctggcaggagatcgcanatgctgcggatgcttctgagccccggtggtgtgtcccancctctgaccgcctccctggcccgccagcggaattgtggangaggaaaaaaancggnccgtgcaggcctacanancgttnaaacancngcagcacnactgcncggggancnaaccccncctcanttcccggnaaaaaaccnnaanccncacntntgattgnaaaaanaccccggggcctggccncnctttgggggcaantggnaccannaactgctacccctgggtnanaaaaaagcnggc

SEQ ID NO: 298 - DNA, 1031 bp, Homo Sapiens
  misc_feature (1)..(2): n is a, c, g, or t
  misc_feature (21)..(21): n is a, c, g, or t
  misc_feature (33)..(33): n is a, c, g, or t
  misc_feature (73)..(73): n is a, c, g, or t
  misc_feature (687)..(687): n is a, c, g, or t
  misc_feature (737)..(737): n is a, c, g, or t
  misc_feature (771)..(771): n is a, c, g, or t
  misc_feature (774)..(775): n is a, c, g, or t
  misc_feature (820)..(820): n is a, c, g, or t
  misc_feature (825)..(825): n is a, c, g, or t
  misc_feature (835)..(836): n is a, c, g, or t
  misc_feature (842)..(842): n is a, c, g, or t
  misc_feature (846)..(846): n is a, c, g, or t
  misc_feature (856)..(856): n is a, c, g, or t
  misc_feature (858)..(858): n is a, c, g, or t
  misc_feature (865)..(865): n is a, c, g, or t
  misc_feature (875)..(875): n is a, c, g, or t
  misc_feature (878)..(878): n is a, c, g, or t
  misc_feature (881)..(881): n is a, c, g, or t
  misc_feature (887)..(887): n is a, c, g, or t
  misc_feature (891)..(891): n is a, c, g, or t
  misc_feature (897)..(897): n is a, c, g, or t
  misc_feature (901)..(901): n is a, c, g, or t
  misc_feature (911)..(911): n is a, c, g, or t
  misc_feature (913)..(913): n is a, c, g, or t
  misc_feature (915)..(915): n is a, c, g, or t
  misc_feature (918)..(918): n is a, c, g, or t
  misc_feature (922)..(922): n is a, c, g, or t
  misc_feature (939)..(939): n is a, c, g, or t
  misc_feature (945)..(945): n is a, c, g, or t
  misc_feature (949)..(949): n is a, c, g, or t
  misc_feature (959)..(959): n is a, c, g, or t
  misc_feature (968)..(968): n is a, c, g, or t
  misc_feature (981)..(982): n is a, c, g, or t
  misc_feature (985)..(985): n is a, c, g, or t
  misc_feature (989)..(989): n is a, c, g, or t
  misc_feature (992)..(992): n is a, c, g, or t
  misc_feature (997)..(997): n is a, c, g, or t
  misc_feature (1002)..(1003): n is a, c, g, or t
  misc_feature (1011)..(1011): n is a, c, g, or t
  misc_feature (1018)..(1018): n is a, c, g, or t
  misc_feature (1020)..(1020): n is a, c, g, or t
nntatagagaattactatganaggatcgcatcntcatcatccatcacggaatcctatttaggtgacactatantaatcgtcgacccacgcgtccgggaggacccacgggcgccgggccggaaggcagctggcagcaggcccaggccagcgggcgcccgcgttcatgttccgccaggagcagccgttggccgagggcagctttgcgcccatgggctccctgcagccggacgcgggcaacgcgagctggaacgggaccgaggcgccggggggcggcgcccgggccaccccttactccctgcaggtgacgctgacgctggtgtgcctggccggcctgctcatgctgctcaccgtgttcggcaacgtgctcgtcatcatcgccgtgttcacgagccgcgcgctcaaggcgccccaaaacctcttcctggtgtctctggcctcggccgacatcctggtggccacgctcgtcatccctttctcgctggccaacgaggtcatgggctactggtacttcggcaaggcttggtgcgagatctacctggcgctcgacgtgctcttctgcacgtcgtccatcgtgcacctgtgcgccatcagcctggaccgctactggtccatcacacaggccatcgagtacaacctgaagcgcagaggccgaaccgctgcccacccagctcaacggcgcccctggcnagcccgcgccggccgggccgcgcgacaccgacgcgctggacctggagganagctcgtcttccgaccacgccgagcggcctccanggnncccgcagatccgagcgcggtccccggggcaaaggcaaggcccgancgagncaggtgaaanncgggcnacancctgccgcgncncgggccngggggcaacnggnatnggaacnccgntgcaangccnggggaaaaancncntcngggntgccaaagccttcccgnttggcncggncggaaaaacnccaaaaaancgctttaagtttnntgnttgnccntggtnaatcnnaatgttcntgggggngnttgatttccct

SEQ ID NO: 299 - DNA, 1174 bp, Homo Sapiens
  misc_feature (884)..(884): n is a, c, g, or t
  misc_feature (897)..(897): n is a, c, g, or t
  misc_feature (934)..(934): n is a, c, g, or t
  misc_feature (947)..(947): n is a, c, g, or t
  misc_feature (950)..(950): n is a, c, g, or t
  misc_feature (953)..(953): n is a, c, g, or t
  misc_feature (968)..(968): n is a, c, g, or t
  misc_feature (970)..(970): n is a, c, g, or t
  misc_feature (994)..(994): n is a, c, g, or t
  misc_feature (1005)..(1005): n is a, c, g, or t
  misc_feature (1009)..(1009): n is a, c, g, or t
  misc_feature (1024)..(1024): n is a, c, g, or t
  misc_feature (1027)..(1028): n is a, c, g, or t
  misc_feature (1031)..(1031): n is a, c, g, or t
  misc_feature (1037)..(1037): n is a, c, g, or t
  misc_feature (1043)..(1043): n is a, c, g, or t
  misc_feature (1047)..(1047): n is a, c, g, or t
  misc_feature (1050)..(1050): n is a, c, g, or t
  misc_feature (1058)..(1058): n is a, c, g, or t
  misc_feature (1060)..(1060): n is a, c, g, or t
  misc_feature (1065)..(1065): n is a, c, g, or t
  misc_feature (1067)..(1067): n is a, c, g, or t
  misc_feature (1085)..(1085): n is a, c, g, or t
  misc_feature (1091)..(1091): n is a, c, g, or t
  misc_feature (1102)..(1102): n is a, c, g, or t
  misc_feature (1110)..(1110): n is a, c, g, or t
  misc_feature (1115)..(1116): n is a, c, g, or t
  misc_feature (1120)..(1120): n is a, c, g, or t
  misc_feature (1132)..(1132): n is a, c, g, or t
  misc_feature (1134)..(1134): n is a, c, g, or t
  misc_feature (1136)..(1137): n is a, c, g, or t
  misc_feature (1148)..(1149): n is a, c, g, or t
  misc_feature (1159)..(1159): n is a, c, g, or t
attagagaaattactatgagaggatcgcatcaccatcaccatcacggatcctatttaggtgacactatagaatcgtcgacccacgcgtccggagcgaccggccgaccatggcgcccggagtggcccgcgggccgacgccgtactggaggttgcgcctcggtggcgccgcgctgctcctgctgctcatcccggtggccgccgcgcaggagcctcccggagctgcttgttctcagaacacaaacaaaacctgtgaagagtgcctgaagaacgtctcctgtctttggtgcaacactaacaaggcttgtctggactacccagttacaagcgtcttgccaccggcttccctttgtaaattgagctctgcacgctggggagtttgttgggtgaactttgaggcgctgatcatcaccatgtcggtagtcgggggaaccctcctcctgggcattgccatctgctgctgctgctgctgcaggaggaagaggagccggaagccggacaggagtgaggagaaggccatgcgtgagcgggaggagaggcggatacggcaggaggaacggagagcagagatgaagacaagacatgatgaaatcagaaaaaaatatggcctgtttaaagaagaaaacccgtatgctagatttgaaaacaactaaagcgctccagcacatcagtcccgacgcttcctgtgaggtgcacgctccgcagcccagcccagccgggagaccacgtggccattgcggtctcctgaccttggccagtgaacctgccagccttccaggacaggcggccggagagctgcccctgaaggacagtcctctcgtcttgcaaactggtgaccttctattccctgttcatctctgtttctagatttagtcacttgaaataanaaatctttggggnttgggcttttttatactcttctcagtttgtgaaaacnctaactgcacacnaanccncctgacggcacccancnctgtggctgtcattctcccagggnaaaaccctgcntttntctctgtccactaanaannttncacacncaaaanaggnaantcggtttnanttttntncatgaagaaaattaacanccctcntcattccccanaaaaaccngaaanngttnggggggcccatntnannttttccacctnntgaactcaanggttttttttaaaaa

SEQ ID NO: 300 - DNA, 1235 bp, Homo Sapiens
  misc_feature (777)..(777): n is a, c, g, or t
  misc_feature (856)..(856): n is a, c, g, or t
  misc_feature (869)..(869): n is a, c, g, or t
  misc_feature (959)..(959): n is a, c, g, or t
  misc_feature (972)..(972): n is a, c, g, or t
  misc_feature (991)..(991): n is a, c, g, or t
  misc_feature (1005)..(1005): n is a, c, g, or t
  misc_feature (1023)..(1023): n is a, c, g, or t
  misc_feature (1043)..(1043): n is a, c, g, or t
  misc_feature (1092)..(1093): n is a, c, g, or t
  misc_feature (1100)..(1100): n is a, c, g, or t
  misc_feature (1122)..(1124): n is a, c, g, or t
  misc_feature (1131)..(1132): n is a, c, g, or t
  misc_feature (1134)..(1134): n is a, c, g, or t
  misc_feature (1145)..(1145): n is a, c, g, or t
  misc_feature (1154)..(1154): n is a, c, g, or t
  misc_feature (1160)..(1160): n is a, c, g, or t
  misc_feature (1168)..(1168): n is a, c, g, or t
  misc_feature (1170)..(1170): n is a, c, g, or t
  misc_feature (1174)..(1174): n is a, c, g, or t
  misc_feature (1182)..(1183): n is a, c, g, or t
  misc_feature (1198)..(1198): n is a, c, g, or t
  misc_feature (1201)..(1201): n is a, c, g, or t
  misc_feature (1208)..(1210): n is a, c, g, or t
  misc_feature (1224)..(1224): n is a, c, g, or t
  misc_feature (1229)..(1229): n is a, c, g, or t
  misc_feature (1235)..(1235): n is a, c, g, or t
tagagaaattactatgagaggatcgcatcaccatcaccatcacggatcctatttaggtgacactatagaatcgtcgacccacgcgtccgcccacgcgtccggtggtagccccaggatgggtgagttcaacgagaagaagacaacatgtggcaccgtttgcctcaagtacctgctgtttacctacaattgctgcttctggctggctggcctggctgtcatggcagtgggcatctggacgctggccctcaagagtgactacatcagcctgctggcctcaggcacctacctggccacagcctacatcctggtggtggcgggcactgtcgtcatggtgactggggtcttgggctgctgcgccaccttcaaggagcgtcggaacctgctgcgcctgtacttcatcctgctcctcatcatctttctgctggagatcatcgctggtatcctcgcctacgcctactaccagcagctgaacacggagctcaaggagaacctgaaggacaccatgaccaagcgctaccaccagccgggccatgaggctgtgaccagcgctgtggaccagctgcagcaggagttccactgctgtggcagcaacaactcacaggactggcgagacagtgagtggatccgctcacaggaggccggtggccgtgtggtcccagacagctgctgcaagacggtggtggctctttgtggacagcgagaccatgcctccaacatctacaaggtggagggcggctgcatcaccaagttggagaccttcatccaggagcacctganggtcattgggggctgtggggatcggcattgcctgtgtgcaggtctttggcatgatcttcacgtgctgcctgtacaggantctcaagctggancactactgaccctgccttgggccttgctgctgctgcacccaactactgagctgaaaccactgaatacaaggggctgggctccctgatganacccacctgtgcnatcaccatacctctggggnacccaacctcaaangcagcttcagtgcctttngctgcccacaatgccaacanggaagtgaagggggctggcgggccaaatttggggggggtttttgggggnntccccgnaaaaaactctttgcctgggggnnnaaaaacnngnttgaaaagggnccttttttnaatggnccaaaggncnaaantttccccnnaagggggaaaaaccnttncaccccnnncccctttaaaaaanggggntttttn

SEQ ID NO: 301 - DNA, 1181 bp, Homo Sapiens
  misc_feature (944)..(944): n is a, c, g, or t
  misc_feature (980)..(980): n is a, c, g, or t
  misc_feature (987)..(987): n is a, c, g, or t
  misc_feature (997)..(997): n is a, c, g, or t
  misc_feature (1008)..(1008): n is a, c, g, or t
  misc_feature (1017)..(1017): n is a, c, g, or t
  misc_feature (1048)..(1048): n is a, c, g, or t
  misc_feature (1066)..(1066): n is a, c, g, or t
  misc_feature (1075)..(1075): n is a, c, g, or t
  misc_feature (1077)..(1077): n is a, c, g, or t
  misc_feature (1087)..(1087): n is a, c, g, or t
  misc_feature (1094)..(1094): n is a, c, g, or t
  misc_feature (1108)..(1108): n is a, c, g, or t
  misc_feature (1116)..(1118): n is a, c, g, or t
  misc_feature (1121)..(1121): n is a, c, g, or t
  misc_feature (1123)..(1123): n is a, c, g, or t
  misc_feature (1135)..(1135): n is a, c, g, or t
  misc_feature (1137)..(1137): n is a, c, g, or t
  misc_feature (1140)..(1140): n is a, c, g, or t
  misc_feature (1148)..(1148): n is a, c, g, or t
  misc_feature (1162)..(1162): n is a, c, g, or t
  misc_feature (1170)..(1171): n is a, c, g, or t
  misc_feature (1175)..(1175): n is a, c, g, or t
  misc_feature (1180)..(1180): n is a, c, g, or t
aatagagaaattactatgagaggatcgcatcaccatcaccatcacggatcctatttaggtgacactatagaatcgtcgacccacgcgtccgcacccagttggacccagtcgcccaggcaccgcccgcgccccgcggccgtctcctgcgcctcccagaggagggagttcgagcatcccccgcggcggccactcctcggggccaggagcggggaagcgaagtgcgagagaccccggaccccagcgctgtctcttcccgccgcccgaaccaccatgacccacttcaacaagggcccttcctatgggctctcggccgaagtcaagaacaagattgcttccaagtatgatcatcaggcagaagaagatcttcgcaattggatagaagaggtgacaggcatgagcattggccccaacttccagctgggcttaaaggatggcatcatcctctgcgaacttataaacaagctacagccaggctcagtgaagaaggtcaacgagtcctcactgaactggcctcagttggagaatattggcaactttattaaagctattcaggcttatggtatgaagccacatgacatattcgaagcaaatgatctttttgagaatggaaacatgacccaggttcagactactctggtggctctagcaggtctggctaaaacaaaaggattccatacaaccattgacattggagttaagtatgcagaaaaacaaacaagacgttttgatgaaggaaaattaaaagctggccaaagtgtaattggtctgcagatgggaaccaacaaatgtgccagccaggcaggtatgacagcttacgggactaggaggcatctttatgatcccaaaatgcaaactgacaaaccttttgaccagaccacaattagtctgcagatgggcactaataaaggagccagccaggcagggatgttagcaccaggtaccanaaaagacatctatgatcagaagctaacattacagcnggggganaactcgacantttccttaaanatgggtacnaacaaagttgctttcccaaaaagaaaatgantgtgtatggggcttgggncggcaatanangatcccaaanactgggntgctcctaaaaacntgtttttnnnaangnaaccaaggaaangnaanaatggttnggaaatcatggaantggatttnngggnaaaanc

SEQ ID NO: 302 - DNA, 891 bp, Homo Sapiens
  misc_feature (738)..(738): n is a, c, g, or t
  misc_feature (860)..(861): n is a, c, g, or t
  misc_feature (866)..(866): n is a, c, g, or t
  misc_feature (870)..(870): n is a, c, g, or t
  misc_feature (872)..(874): n is a, c, g, or t
  misc_feature (877)..(877): n is a, c, g, or t
  misc_feature (879)..(883): n is a, c, g, or t
  misc_feature (885)..(891): n is a, c, g, or t
aatagagagattactatgagaggatcgcatcaccatcaccatcacggatcctatttaggtgacactatagaatcgtcgacccacgcgtccgcaaggccatcgcgctcttcacgcccgacgcctgtggcctctcagacccggcccacgttgagagcctgcaggagaaggcgcaggtggccctcaccgagtatgtgcgggcgcagtacccgtcccagccccagcgcttcgggcgcctgctgctgcggctccccgccctgcgcgcggtccctgcctccctcatctcccagctgttcttcatgcgcctggtggggaagacgcccattgagacactgatcagagacatgctgctgtcggggagtaccttcaactggccctacggctcgggccagtgaccatgacggggccacgtgtgctgtggccaggcctgcagacagacctcaagggacagggaatgctgaggcctcgaggggcctcccggggcccaggactctggcttctctcctcagacttctattttttaaagactgtgaaatgtttgtcttttctgttttttaaatgatcatgaaaccaaaaagagactgatcatccaggcctcagcctcatcctccccaggacccctgtccaggatggagggtccaatcctaggacagccttgttcctcagcacccctagcatgaacttgtgggatggtggggttggcttccctggcatgatggacaaaggcctggcgtcggccanaggggctgctccagtgggcaggggtagctagcgtgtgccaggcagatcctctggacacgtaacctatgtcagacactacatgatgactcaaggccaaataataaagacatttcctacctgcnnaaaanaaanannnaanannnnnannnnnnn

SEQ ID NO: 303 - DNA, 918 bp, Homo Sapiens
  misc_feature (719)..(719): n is a, c, g, or t
  misc_feature (762)..(762): n is a, c, g, or t
  misc_feature (793)..(793): n is a, c, g, or t
  misc_feature (820)..(820): n is a, c, g, or t
  misc_feature (828)..(828): n is a, c, g, or t
  misc_feature (831)..(831): n is a, c, g, or t
  misc_feature (833)..(833): n is a, c, g, or t
  misc_feature (855)..(855): n is a, c, g, or t
  misc_feature (879)..(879): n is a, c, g, or t
  misc_feature (885)..(885): n is a, c, g, or t
  misc_feature (909)..(909): n is a, c, g, or t
  misc_feature (916)..(916): n is a, c, g, or t
  misc_feature (918)..(918): n is a, c, g, or t
atagagaaattactatgagaggatcgcatcaccatcaccatcacggatcctatttaggtgacactatagaatcgtcgacccacgcgtccgcagctttgggtggtggccgctgccgggcatcggcttccagtccgcggagggcgaggcggcgtggacagcggccccggcacccagcgccccgccgcccgcaagccgcgcgcccgtccgccgcgccccgagcccgccgcttcctatctcagcgccctgccgccgccgccgcggcccagcgagcggccctgatgcaggccatcaagtgtgtggtggtgggagacggagctgtaggtaaaacttgcctactgatcagttacacaaccaatgcatttcctggagaatatatccctactgtctttgacaattattctgccaatgttatggtagatggaaaaccggtgaatctgggcttatgggatacagctggacaagaagattatgacagattacgccccctatcctatccgcaaacagatgtgttcttaatttgcttttcccttgtgagtcctgcatcatttgaaaatgtccgtgcaaagtggtatcctgaggtgcggcaccactgtcccaacactcccatcatcctagtgggaactaaacttgatcttagggatgataaagacacgatcgagaaactgaaggagaagaagctgactcccatcacctatccgcagggtctagccatggctaangagattggtgctgtaaaatacctggagtgctcggcgctcacanagcgaggcctcaagacagtgtttgaacaaancgatccgagcagtcctctgcccgcctnccgtgaanaanangaaaagaaaatgcctgctgtgnaaaatgtctcaacccctcgtttcntggtcntgtccctttgaaacctttgtacgnttttgcntn

SEQ ID NO: 304 - DNA, 1238 bp, Homo Sapiens
  misc_feature (1)..(1): n is a, c, g, or t
  misc_feature (896)..(896): n is a, c, g, or t
  misc_feature (962)..(962): n is a, c, g, or t
  misc_feature (975)..(975): n is a, c, g, or t
  misc_feature (991)..(991): n is a, c, g, or t
  misc_feature (996)..(996): n is a, c, g, or t
  misc_feature (1000)..(1000): n is a, c, g, or t
  misc_feature (1013)..(1013): n is a, c, g, or t
  misc_feature (1044)..(1044): n is a, c, g, or t
  misc_feature (1054)..(1054): n is a, c, g, or t
  misc_feature (1083)..(1083): n is a, c, g, or t
  misc_feature (1087)..(1087): n is a, c, g, or t
  misc_feature (1093)..(1093): n is a, c, g, or t
  misc_feature (1121)..(1121): n is a, c, g, or t
  misc_feature (1125)..(1125): n is a, c, g, or t
  misc_feature (1128)..(1128): n is a, c, g, or t
  misc_feature (1140)..(1140): n is a, c, g, or t
  misc_feature (1143)..(1143): n is a, c, g, or t
  misc_feature (1146)..(1146): n is a, c, g, or t
  misc_feature (1154)..(1154): n is a, c, g, or t
  misc_feature (1163)..(1163): n is a, c, g, or t
  misc_feature (1179)..(1179): n is a, c, g, or t
  misc_feature (1186)..(1186): n is a, c, g, or t
  misc_feature (1194)..(1194): n is a, c, g, or t
  misc_feature (1199)..(1199): n is a, c, g, or t
  misc_feature (1205)..(1206): n is a, c, g, or t
  misc_feature (1209)..(1209): n is a, c, g, or t
  misc_feature (1215)..(1215): n is a, c, g, or t
  misc_feature (1219)..(1220): n is a, c, g, or t
  misc_feature (1232)..(1232): n is a, c, g, or t
nttagagaaattactatgagaggatcgcatcaccatcaccatcacggatcctatttaggtgacactatagaatcgtcgacccacgcgtccgagaggccgaactcgggttctgacaagatggccgggctgccccgcaggatcatcaaggaaacccagcgtttgctggcagaaccagttcctggcatcaaagccgaaccagatgagagcaacgcccgttattttcatgtggtcattgctggccctcaggattccccctttgagggagggacttttaaacttgaactattccttccagaagaatacccaatggcagcccctaaagtacgtttcatgaccaaaatttatcatcctaatgtagacaagttgggaagaatatgtttagatattttgaaagataagtggtccccagcactgcagatccgcacagttctgctatcgatccaggccttgttaagtgctcccaatccagatgatccattagcaaatgatgtagcggagcagtggaagaccaacgaagcccaagccatagaaacagctagagcatggactaggctatatgccatgaataatatttaaattgatacgatcatcaagtgtgcatcacttctcctgttctgccaagacttcctcctctttgtttgcatttaatggacacagtcttagaaacattacagaataaaaaagcccagacatcttcagtcctttggtgattaaatgcacattagcaaatctatgtcttgtcctgattcactgtcataaagcatgagcagaggctagaagtatcatctggattgttgtgaaacgtttaaaagcagtggcccctccctgcttttattcatttcccccatcctggtttaagtataaagcactgtgaatgaaggtagttgtcaggttanctgcagggggggggggggttttatttaatttaattaatttaattttgagggggggaggtagttaantttatgggctccnttcccccttttttggngatcnaatngcattggttaaangcagctaaccaggtctttaaaaatgctctanccaagtctantttatttaaaccctgtaaaggacaacctngatngttggnaccaaatgggaacttaaacaactcccancccnccnaaaaaaaattgnggncangggaaatncccccctcnaaaaaacttgggaacnttttttngggtgggnggaanctccgnnaancttttntttnnaaaaaatttttntttttt

SEQ ID NO: 305 - DNA, 1179 bp, Homo Sapiens
  misc_feature (1)..(2): n is a, c, g, or t
  misc_feature (826)..(826): n is a, c, g, or t
  misc_feature (885)..(885): n is a, c, g, or t
  misc_feature (892)..(892): n is a, c, g, or t
  misc_feature (895)..(895): n is a, c, g, or t
  misc_feature (898)..(898): n is a, c, g, or t
  misc_feature (910)..(910): n is a, c, g, or t
  misc_feature (918)..(918): n is a, c, g, or t
  misc_feature (948)..(948): n is a, c, g, or t
  misc_feature (968)..(968): n is a, c, g, or t
  misc_feature (989)..(989): n is a, c, g, or t
  misc_feature (996)..(996): n is a, c, g, or t
  misc_feature (1007)..(1007): n is a, c, g, or t
  misc_feature (1013)..(1013): n is a, c, g, or t
  misc_feature (1027)..(1027): n is a, c, g, or t
  misc_feature (1034)..(1034): n is a, c, g, or t
  misc_feature (1041)..(1041): n is a, c, g, or t
  misc_feature (1055)..(1055): n is a, c, g, or t
  misc_feature (1057)..(1057): n is a, c, g, or t
  misc_feature (1059)..(1059): n is a, c, g, or t
  misc_feature (1087)..(1087): n is a, c, g, or t
  misc_feature (1097)..(1097): n is a, c, g, or t
  misc_feature (1107)..(1109): n is a, c, g, or t
  misc_feature (1114)..(1114): n is a, c, g, or t
  misc_feature (1118)..(1118): n is a, c, g, or t
  misc_feature (1120)..(1120): n is a, c, g, or t
  misc_feature (1124)..(1125): n is a, c, g, or t
  misc_feature (1136)..(1136): n is a, c, g, or t
  misc_feature (1139)..(1139): n is a, c, g, or t
  misc_feature (1146)..(1146): n is a, c, g, or t
  misc_feature (1148)..(1148): n is a, c, g, or t
  misc_feature (1175)..(1175): n is a, c, g, or t
  misc_feature (1178)..(1178): n is a, c, g, or t
nnatagagaaattactatgagaggatcgcatcaccatcaccatcacggatcctatttaggtgacactatagaatcgtcgacccacgcgtccgcctggagtctctgtggcgcggtttcctgtacctgccttgggatccggagggaggaagctgggacacccgggagtcaggaaatggactcggtggcttttgaggatgtagatgtgaacttcacccaggaggagtgggctttgctagatccttcccagaagaatctctacagagatgtgatgtgggaaaccatgaggaatctggcctctatagggaaaaaatggaaggaccagaacattaaagatcactacaaacaccgagggagaaatctaagaagtcatatgttagaaagactctatcaaactaaggatggtagtcagcgtggaggaatttttagccagtttgcaaatcagaatctgagcaagaaaatccctggagtgaaactctgtgaaagcattgtatatggagaagtcagcatgggtcagtcatcccttaatagacacatcaaagatcacagtggacatgaaccaaaggaatatcaggaatatggagagaagccagatacacgtaaccagtgttggaaacccttcagttctcaccactcctttcgaacacatgagataattcacactggagagaaactctatgattgtaaggaatgtggaaaaaccttcttttctctcaaaagaattagaagacacatcatcacacacagtggatatacaccatataaatgtaaggtgtgtgggaaagcttttgattatcccagtagatttccaaacacatgaaagaagtcncactggagagaaaccctatgaatgtcaggaatgtggaaaagccttcccttgtatcacangtgttcnaanacncatgataaagcncactgganatggaccttataaatgtaaggtatgtgggnaaaccctttcattccctganttcatttcaagtgcatgaaanaatcccnctggaaaaaancccttnaaatgtaaccatgnggtaaanccttcanttgttcccccaccntncnaaaacctgaaaaaacccctactggaaanaaaccttttnaatgccaccnnnggggnaagncnttcnntttttcccccnccntccacancngaaaaaaattcccccggggaaaaaccntcnc

SEQ ID NO: 306 - DNA, 1161 bp, Homo Sapiens
  misc_feature (813)..(813): n is a, c, g, or t
  misc_feature (859)..(859): n is a, c, g, or t
  misc_feature (892)..(892): n is a, c, g, or t
  misc_feature (912)..(912): n is a, c, g, or t
  misc_feature (921)..(921): n is a, c, g, or t
  misc_feature (945)..(945): n is a, c, g, or t
  misc_feature (970)..(970): n is a, c, g, or t
  misc_feature (982)..(982): n is a, c, g, or t
  misc_feature (985)..(985): n is a, c, g, or t
  misc_feature (989)..(989): n is a, c, g, or t
  misc_feature (994)..(994): n is a, c, g, or t
  misc_feature (1021)..(1021): n is a, c, g, or t
  misc_feature (1024)..(1024): n is a, c, g, or t
  misc_feature (1026)..(1026): n is a, c, g, or t
  misc_feature (1037)..(1037): n is a, c, g, or t
  misc_feature (1049)..(1049): n is a, c, g, or t
  misc_feature (1052)..(1053): n is a, c, g, or t
  misc_feature (1057)..(1057): n is a, c, g, or t
  misc_feature (1068)..(1068): n is a, c, g, or t
  misc_feature (1072)..(1072): n is a, c, g, or t
  misc_feature (1087)..(1087): n is a, c, g, or t
  misc_feature (1092)..(1092): n is a, c, g, or t
  misc_feature (1099)..(1099): n is a, c, g, or t
  misc_feature (1102)..(1102): n is a, c, g, or t
  misc_feature (1109)..(1109): n is a, c, g, or t
  misc_feature (1115)..(1115): n is a, c, g, or t
  misc_feature (1117)..(1117): n is a, c, g, or t
  misc_feature (1121)..(1123): n is a, c, g, or t
  misc_feature (1126)..(1126): n is a, c, g, or t
  misc_feature (1128)..(1128): n is a, c, g, or t
  misc_feature (1137)..(1137): n is a, c, g, or t
  misc_feature (1155)..(1155): n is a, c, g, or t
  misc_feature (1158)..(1158): n is a, c, g, or t
aatagagaaattactatgagaggatcgcatcaccatcaccatcacggatcctatttaggtgacactatagaatcgtcgacccacgcgtccgcccacgcgtccgcccacgcgtccgcgctccggaagggtggtcagcgccgtggaggaggtgcccggagcagtgcccaagctgactcgggttccagtgacgatgaggcagccagtgaggcccgcagcaccgccagtgaatgccccagccttctcagcaccactgcagaggacagccttgggggggatgtcgtggatgagcagggccagcaggaagaccttgaggaaaagctgaaggagtatgtggactgtctcacagacaagagtgccaagacccggcagggtgctcttgagagcctgcgcctggccctagcgtcccgcctactccccgacttcttgctggagcgccgcctcacgctagccgatgccctggaaaagtgcctcaagaaagggaagggcgaggaacaagccctggctgctgctgtgctaggcctgctctgcgtgcagctgggccctggacctaagggtgaggagctgtttcacagcctgcagcctctgctggtctctgtgctcagtgacagcacagctagccctgctgcccggctccactgtgcttctgcccttggcctgggctgctacgtggctgccgctgacatccaggacctggtctcttgccttgcctgcttagaaagtgttttcagccagtgaaagtgtgaacctgcggatcgctgccggtgaaaccattgcactgctctttgagcttgcccgggacctttgaggaaggantttgtttacgaaggacatggaaggccctctgcaatgtcctgcgcantctggccactgaacagtaaacaaattaccgtgnccaaggctgatcgttcggcnccagcgttntactttccccgcccgtgcttgcantcccgtggaagggcggttgaatgcnaaaaaaaaaaanaantgcngcttncggcttttgaaagtgcttctacatggncancntgggctccggncaccgaaatttnacnnctgnctttaaggaanttgntgggtttcggcattnccccnccaactnccnaaaaaangacccnancccnnnaanantttttgccntgggcccctttgatgttnctngaa

SEQ ID NO: 307 - DNA, 489 bp, Homo Sapiens
  misc_feature (412)..(412): n is a, c, g, or t
  misc_feature (428)..(428): n is a, c, g, or t
  misc_feature (433)..(433): n is a, c, g, or t
  misc_feature (439)..(439): n is a, c, g, or t
  misc_feature (446)..(446): n is a, c, g, or t
  misc_feature (450)..(450): n is a, c, g, or t
  misc_feature (452)..(452): n is a, c, g, or t
  misc_feature (455)..(455): n is a, c, g, or t
  misc_feature (457)..(457): n is a, c, g, or t
  misc_feature (459)..(459): n is a, c, g, or t
  misc_feature (471)..(471): n is a, c, g, or t
  misc_feature (476)..(476): n is a, c, g, or t
  misc_feature (484)..(485): n is a, c, g, or t
  misc_feature (487)..(488): n is a, c, g, or t
tagagaaattactatggagaggatcgcatcaccatcaccatcacgggatcctatttaggtgacactatagaatcgtcgacccacgcgtccgcccacgcgatccgcgctccccgcctccccagctcttctccgctcttcccccccgcgcttggctcggcgcgctccggccggccgcaaagtttcccgggcggcagcggcggctgcgcctcgcttcagcgatggccgcggagctgagcatggggccagagctgcccaccagcccgctggccatggagtatgtcaacgacttcgacctgctcaagttcgacgtgaagaaggagccactggggcgcgcggagcgtccgggcaggccctgcacacgcctgcagccagccggctcggtgtcctccacaccgctcagcactccgtgtanctccgtgccctcgtcncccancttcancccgacngaananaanananacctcgaggatntgtantggatggnnanna

SEQ ID NO: 308 - DNA, 825 bp, Homo Sapiens
  misc_feature (796)..(799): n is a, c, g, or t
  misc_feature (806)..(825): n is a, c, g, or t
tagagaaattaactatgagaggatcgcatcaccatcaccatcacggatcctatttaggtgacactatagaatcgtcgacccacgcgtccgcccacgcgtccggcatggtgggcgcgctgcagttcgaggtgctcatggcggctgtgggcgcgccccgcttccccagtgcgctgggcctggtgttgctcgtggaggccgcggctgtgctcatcggaccgccctctgccggccgcctggtggatgcgttgaagaactatgagatcatcttctacctggccggctctgaggtggccctggctggggtcttcatggctgtcgccaccaactgctgcctgcgttgtgctaaagctgccccgtcaggcccaggcactgagggcggagccagtgacactgaggacgctgaggctgaaggggactctgagcccctgcctgttgttgcagaggaacccggcaacctggaggccctggaggtgctcagcgcccggggcgagcccacagaaccagaaatagaggcgaggccgaggctggctgccgagtctgtataactcagggtgctctgggtggggtggcccagtgacttgggaacacagcttcttgtctcagagagcctggtacgctgggaggctggtctggggtggtcactcccggggtccacgtctgggctccagttgatcccctgggtgtctgggaactgcctccctcatctgtgccccaagttccgccaggccctgccccatcgccagtgaagctgctatggagcaacaggaaactggtgataaagctcagctgaacgacnnnnaaaaaannnnnnnnnnnnnnnnnnnn

SEQ ID NO: 309 - DNA, 1278 bp, Homo Sapiens
  misc_feature (819)..(819): n is a, c, g, or t
  misc_feature (900)..(900): n is a, c, g, or t
  misc_feature (931)..(931): n is a, c, g, or t
  misc_feature (933)..(933): n is a, c, g, or t
  misc_feature (937)..(937): n is a, c, g, or t
  misc_feature (943)..(943): n is a, c, g, or t
  misc_feature (962)..(962): n is a, c, g, or t
  misc_feature (997)..(997): n is a, c, g, or t
  misc_feature (1010)..(1010): n is a, c, g, or t
  misc_feature (1021)..(1021): n is a, c, g, or t
  misc_feature (1028)..(1028): n is a, c, g, or t
  misc_feature (1033)..(1033): n is a, c, g, or t
  misc_feature (1036)..(1036): n is a, c, g, or t
  misc_feature (1045)..(1045): n is a, c, g, or t
  misc_feature (1047)..(1047): n is a, c, g, or t
  misc_feature (1054)..(1054): n is a, c, g, or t
  misc_feature (1072)..(1073): n is a, c, g, or t
  misc_feature (1079)..(1079): n is a, c, g, or t
  misc_feature (1092)..(1092): n is a, c, g, or t
  misc_feature (1096)..(1096): n is a, c, g, or t
  misc_feature (1112)..(1112): n is a, c, g, or t
  misc_feature (1117)..(1117): n is a, c, g, or t
  misc_feature (1123)..(1123): n is a, c, g, or t
  misc_feature (1129)..(1129): n is a, c, g, or t
  misc_feature (1138)..(1138): n is a, c, g, or t
  misc_feature (1141)..(1141): n is a, c, g, or t
  misc_feature (1148)..(1148): n is a, c, g, or t
  misc_feature (1154)..(1154): n is a, c, g, or t
  misc_feature (1156)..(1156): n is a, c, g, or t
  misc_feature (1159)..(1159): n is a, c, g, or t
  misc_feature (1177)..(1177): n is a, c, g, or t
  misc_feature (1181)..(1182): n is a, c, g, or t
  misc_feature (1185)..(1186): n is a, c, g, or t
  misc_feature (1192)..(1192): n is a, c, g, or t
  misc_feature (1198)..(1198): n is a, c, g, or t
  misc_feature (1200)..(1201): n is a, c, g, or t
  misc_feature (1214)..(1214): n is a, c, g, or t
  misc_feature (1223)..(1223): n is a, c, g, or t
  misc_feature (1228)..(1229): n is a, c, g, or t
  misc_feature (1249)..(1249): n is a, c, g, or t
  misc_feature (1251)..(1251): n is a, c, g, or t
  misc_feature (1265)..(1265): n is a, c, g, or t
  misc_feature (1268)..(1268): n is a, c, g, or t
  misc_feature (1271)..(1271): n is a, c, g, or t
aatagagaaattactatgagaggatcgcatcaccatcaccatcacggatcctatttaggtgacactatagaatcgtcgacccacgcgtccgcccaagtccagcacaagatagacgtcatcggcaatgagattctgcgccgaggctgccatgtgaacgatcgtgacgggctgaccgacatgacactgctccactatgcgtgcaaagctggggcccacggagtcggggaccccgcggcagccgtgcgcctctcgcagcagctgctggcgctgggcgcagatgtgacgctgcgcagccgctggaccaacatgaacgcgcttcactacgcggcctattttgatgtgcccgacctcgtgcgtgtgctgctgaagggtgcgaggccgcgagtggtgaactccacgtgcagtgacttcaaccacggctcagccctgcacatcgctgcttccagcctgtgcctgggcgccgctaaatgtttgctggagcacggcgccaaccctgcgctgaggaatcgaaaaggacaggtgccggcggaggtggtcccagatcctatggacatgtccctggacaaggcagaggcggcactggtggccaaggagctgcggacgcttctggaagaggcagtgccactatcttgcgccctccccaaggtcacgctacccaactatgacaacgtcccaggcaatctcatgcttagcgcactgggcttgcgcctgggagaccgcgtgctgctggatggccagaagacgggcacactgcggttctgtgggaccacggagtttgccagcggccagtgggtgggcgtggagctggacaaacctganggcaagaacgatggcagcgttgggggcgttcggtacttcatctgccctcccaagcagggtctctttgcctccgtgtccaanatctccaaggcagtggacgcaccccccttcntntgtnacttcnaaaccccggaaccccccgnatggacttctcccgtgtcaccggcaaaggccgcanggaaaacaaaggnaaaaaaaaaancccatcntcccnttntttgggaantngcaacancgtgacggggccaaggtnnagttgnaaacaagttcttnttcngggccaaaaacagggnatctngccttntacggnaaaaaaaanttnccccagnttttgntnggnattaacttgaaccccccnaagnnaanntaaggncttttntnngggccggaattcnttgcccccnaaganngggtttttcccccccctccnanttaaaaatgggganccnttnttcccgg

SEQ ID NO: 310 - DNA, 1202 bp, Homo Sapiens
  misc_feature (869)..(869): n is a, c, g, or t
  misc_feature (917)..(917): n is a, c, g, or t
  misc_feature (933)..(933): n is a, c, g, or t
  misc_feature (957)..(957): n is a, c, g, or t
  misc_feature (973)..(973): n is a, c, g, or t
  misc_feature (986)..(986): n is a, c, g, or t
  misc_feature (996)..(996): n is a, c, g, or t
  misc_feature (1016)..(1016): n is a, c, g, or t
  misc_feature (1021)..(1022): n is a, c, g, or t
  misc_feature (1025)..(1025): n is a, c, g, or t
  misc_feature (1032)..(1032): n is a, c, g, or t
  misc_feature (1040)..(1040): n is a, c, g, or t
  misc_feature (1049)..(1049): n is a, c, g, or t
  misc_feature (1061)..(1061): n is a, c, g, or t
  misc_feature (1081)..(1081): n is a, c, g, or t
  misc_feature (1088)..(1088): n is a, c, g, or t
  misc_feature (1099)..(1099): n is a, c, g, or t
  misc_feature (1105)..(1106): n is a, c, g, or t
  misc_feature (1109)..(1109): n is a, c, g, or t
  misc_feature (1116)..(1116): n is a, c, g, or t
  misc_feature (1126)..(1126): n is a, c, g, or t
  misc_feature (1129)..(1129): n is a, c, g, or t
  misc_feature (1140)..(1140): n is a, c, g, or t
  misc_feature (1158)..(1158): n is a, c, g, or t
  misc_feature (1168)..(1168): n is a, c, g, or t
  misc_feature (1174)..(1176): n is a, c, g, or t
  misc_feature (1183)..(1183): n is a, c, g, or t
  misc_feature (1185)..(1185): n is a, c, g, or t
  misc_feature (1187)..(1187): n is a, c, g, or t
  misc_feature (1197)..(1197): n is a, c, g, or t
  misc_feature (1202)..(1202): n is a, c, g, or t
aatagagaaattactatgagaggatcgcatcaccatcaccatcacggatcctatttaggtgacactatagaatcgtcgacccacgcgtccgagcagggcctgcaagtttcattccaaaaagtgatgctgagaagatatgaaagatgttgtcttgagaaattacgcttaaggaatgactgggaaattgtgggtgagtggaaagggcagaaggcaagttataatggacttgacctatgctcagcaactactcatagcaaaaactttcaatgcaataaatgtgtgaaaggttttagtaaatttgcaaatctaaataaatgtaagataagccatactggagaaaaaccattcaaatgcaaagaatgtggcaatgtctcttgcatgtctttaataatgactcaacagcagagaatccatattggagagaacccgtaccaatgtaaaaaatgtggcaaagcctttaatgagtgctcatgctttactgactgtaagagaattcatgttggagagaaacattgcaaatgtgaagaatgtaataacatttttaagtcttgctcaagtcttgctgttgttgagaaaaatcatactgaaaagaaaacctacagatgtgaagaatgtggcaaagcttttaacctgtgctcagttcttactaaacataagaaaattcatactggagagaaaccatacaaatgtgaagaatgtggcaaatcctttaagttgttcccataccttactcaacacaagagaattcatagtagagagaaaccctacaagtgtgaagaatgtggcaaagtctttaaattgttgtcataccttactcaacatagaagaattcatactggagagaaaccttccgatgtgaagaatgtggnaaaggcctttaaccagagctcacatctgactgaacataggagaattcntactggtgagaaaccntacaaatgtgaggaatgtggcaanccttttacctggttcncataccttattcngcataaaaanaattcctactgggccaaaanccccnnacnaatgggnaggaatgnggccaaacnttttaccctggntttccctacccttaccccancaaaaanaaattcctacngggaannaanccccacnaatgggatgnaangggccaaaccntttaaccgggtttccaanccttaccaanccaaannnaaattcntncngggaaaaaanccccn

SEQ ID NO: 311 - DNA, 1274 bp, Homo Sapiens
  misc_feature (780)..(780): n is a, c, g, or t
  misc_feature (824)..(824): n is a, c, g, or t
  misc_feature (835)..(835): n is a, c, g, or t
  misc_feature (842)..(842): n is a, c, g, or t
  misc_feature (846)..(846): n is a, c, g, or t
  misc_feature (851)..(851): n is a, c, g, or t
  misc_feature (854)..(854): n is a, c, g, or t
  misc_feature (869)..(869): n is a, c, g, or t
  misc_feature (893)..(893): n is a, c, g, or t
  misc_feature (896)..(896): n is a, c, g, or t
  misc_feature (915)..(915): n is a, c, g, or t
  misc_feature (925)..(925): n is a, c, g, or t
  misc_feature (930)..(931): n is a, c, g, or t
  misc_feature (952)..(952): n is a, c, g, or t
  misc_feature (994)..(994): n is a, c, g, or t
  misc_feature (996)..(996): n is a, c, g, or t
  misc_feature (1009)..(1009): n is a, c, g, or t
  misc_feature (1028)..(1028): n is a, c, g, or t
  misc_feature (1030)..(1030): n is a, c, g, or t
  misc_feature (1032)..(1032): n is a, c, g, or t
  misc_feature (1040)..(1040): n is a, c, g, or t
  misc_feature (1052)..(1052): n is a, c, g, or t
  misc_feature (1054)..(1054): n is a, c, g, or t
  misc_feature (1064)..(1064): n is a, c, g, or t
  misc_feature (1068)..(1068): n is a, c, g, or t
  misc_feature (1072)..(1072): n is a, c, g, or t
  misc_feature (1074)..(1074): n is a, c, g, or t
  misc_feature (1081)..(1081): n is a, c, g, or t
  misc_feature (1087)..(1087): n is a, c, g, or t
  misc_feature (1093)..(1093): n is a, c, g, or t
  misc_feature (1096)..(1096): n is a, c, g, or t
  misc_feature (1099)..(1099): n is a, c, g, or t
  misc_feature (1101)..(1101): n is a, c, g, or t
  misc_feature (1107)..(1107): n is a, c, g, or t
  misc_feature (1113)..(1113): n is a, c, g, or t
  misc_feature (1125)..(1126): n is a, c, g, or t
  misc_feature (1135)..(1135): n is a, c, g, or t
  misc_feature (1138)..(1138): n is a, c, g, or t
  misc_feature (1142)..(1143): n is a, c, g, or t
  misc_feature (1154)..(1154): n is a, c, g, or t
  misc_feature (1171)..(1171): n is a, c, g, or t
  misc_feature (1184)..(1184): n is a, c, g, or t
  misc_feature (1191)..(1191): n is a, c, g, or t
  misc_feature (1202)..(1202): n is a, c, g, or t
  misc_feature (1205)..(1205): n is a, c, g, or t
  misc_feature (1209)..(1209): n is a, c, g, or t
  misc_feature (1220)..(1220): n is a, c, g, or t
  misc_feature (1237)..(1237): n is a, c, g, or t
aatagagaaattactatgagaggatcgcatcaccatcaccatcacggatcctatttaggtgacactatagaatcgtcgacccacgcgtccgcccacgcgtccgcccacgcgtccgcccacgcgtccggcggcggcaggaggaggaagagctgtttcggcgcaagcacgtgcggcagcaggagctattgctgaagttgctacagcagcagcaggcggtccctgtgccccccgcacccagctccccgcccccactctgggctggcctggccaagcaggggctgtccatgaagacgctcctggagttgcagctggagggcgagcggcagctgcacaaacagcccccacctcgggagcctgggcactgcccccctgaaccagtgggtgtctgaggctgggccactgtggggcgggccagacaagagtgggggcggcagcagcggcctggggctctgggaggacacccccaagagcggcgggagcctggtccgtggcctcggcctgaagaacagccggagcagcccatctctcagtgactcatacagccacctatcgggtcggcccattcgcaaaaagacggaggaagaagagaagctgctgaagctgctgcagggcattcccaggccccaggacggcttcacccagtggtgcgagcagatgctgcacacgctgagcgccacgggcagcctggacgtgcccatggctgtagcgatcctcaaggaggtggaatccccctatgatgtccacgattatatccgttcctgcctggggggacacgctggnaagccaaagaatttgccaaacaattcttggaacggagggccaancaaaaagccanccagcancggnagcancancaggaaggcatgggntgaacagcgcctcgcttgcaaaanggnctttcaggccaaccaacancaaccaaaantcggnnccgggggaaggcaagcaaggnccaaaaaggcgggcaactggatgctgcacttcaaaccccaanantcttgggggtaantcccttgcacggatttttntngnggaaaatnaaaaacgtggantnaattattgancaancccngnaaccccnaacccnctgggnttntangncaaggnaaacanaccggcctgganngaaggttcnaancttnnaggctcccccnaaaaaaaaaagaaaaancagggggggggtncccaccntttttaaaaancanaatncctttatcttncccccccaaggcttttnaaaatggggaagggggttttttttttttttttttttt

SEQ ID NO: 312 - DNA, 1179 bp, Homo Sapiens
  misc_feature (11)..(11): n is a, c, g, or t
  misc_feature (795)..(795): n is a, c, g, or t
  misc_feature (867)..(867): n is a, c, g, or t
  misc_feature (883)..(883): n is a, c, g, or t
  misc_feature (896)..(896): n is a, c, g, or t
  misc_feature (899)..(899): n is a, c, g, or t
  misc_feature (923)..(923): n is a, c, g, or t
  misc_feature (927)..(927): n is a, c, g, or t
  misc_feature (934)..(934): n is a, c, g, or t
  misc_feature (949)..(949): n is a, c, g, or t
  misc_feature (965)..(965): n is a, c, g, or t
  misc_feature (967)..(967): n is a, c, g, or t
  misc_feature (986)..(986): n is a, c, g, or t
  misc_feature (997)..(997): n is a, c, g, or t
  misc_feature (999)..(1000): n is a, c, g, or t
  misc_feature (1006)..(1006): n is a, c, g, or t
  misc_feature (1009)..(1009): n is a, c, g, or t
  misc_feature (1023)..(1023): n is a, c, g, or t
  misc_feature (1041)..(1041): n is a, c, g, or t
  misc_feature (1056)..(1056): n is a, c, g, or t
  misc_feature (1058)..(1058): n is a, c, g, or t
  misc_feature (1062)..(1062): n is a, c, g, or t
  misc_feature (1066)..(1066): n is a, c, g, or t
  misc_feature (1070)..(1070): n is a, c, g, or t
  misc_feature (1090)..(1090): n is a, c, g, or t
  misc_feature (1094)..(1094): n is a, c, g, or t
  misc_feature (1100)..(1100): n is a, c, g, or t
  misc_feature (1102)..(1102): n is a, c, g, or t
  misc_feature (1119)..(1119): n is a, c, g, or t
  misc_feature (1122)..(1122): n is a, c, g, or t
  misc_feature (1129)..(1129): n is a, c, g, or t
  misc_feature (1138)..(1138): n is a, c, g, or t
  misc_feature (1142)..(1142): n is a, c, g, or t
  misc_feature (1144)..(1144): n is a, c, g, or t
  misc_feature (1148)..(1148): n is a, c, g, or t
  misc_feature (1161)..(1161): n is a, c, g, or t
  misc_feature (1177)..(1177): n is a, c, g, or t
gagaaattacnatgagaggatcgcatcaccatcaccatcacggatcctatttaggtgacactatagaatcgtcgacccacgcgtccggaggcgagcaccgggaaggggagcgtggggccgctggaatgggtgaatttaaggtccatcgagtacgtttctttaattatgttccatcaggaatccgctgtgtggcttacaataaccagtcaaacagattggctgtttcacgaacagatggcactgtggaaatttataacttgtcagcaaactactttcaggagaaatttttcccaggtcatgagtctcgggctacagaagctttgtgctgggcagaaggacagcgactctttagtgctgggctcaatggcgagattatggagtatgatttacaggcgttaaacatcaagtatgctatggatgcctttggaggacctatttggagcatggctgccagccccagtggctctcaacttttggttggttgtgaagatggatctgtgaaactatttcaaattaccccagacaaaatccagtttgaaagaaattttgatcggcagaaaagtcgcatcctgagtctcagctggcatccctctggtacccacattgcagctggttccatagactacattagtgtgtttgatgtcaaatcaggcagcgctgttcataagatgattgtggacaggcagtatatgggcgtgtctaagcggaagtgcatcgtgtggggtgtcgccttcttgtccgatggcactatcataagtgtggactctgctgggaaggtgcagttctgggactcanccactgggacgcttgtgaagagccatctcatcgctaatgctgacgtgcagtccattgctgtagctgaccaanaaaacagtttcgtggngggcacagccganggnaacagtcttccattttcagctggncccnggggacntctaacagcagtganaaacaagtgggggcgnanaaaaccgttccagcatccnactcatgacgngnncactgnggnccccagcccaacancgctgaaatctggaggcnctgaccccccttaancnttcncccncccngggaaaaaggggaaataaanaatnacaagncnccccccaaaaaaccccnttnccccccnaaggttccnctcncngttnttaaaaaaaggancctcccccccccccgntt

SEQ ID NO: 313 - DNA, 1236 bp, Homo Sapiens
  misc_feature (1)..(1): n is a, c, g, or t
  misc_feature (13)..(13): n is a, c, g, or t
  misc_feature (773)..(773): n is a, c, g, or t
  misc_feature (853)..(853): n is a, c, g, or t
  misc_feature (883)..(883): n is a, c, g, or t
  misc_feature (897)..(897): n is a, c, g, or t
  misc_feature (906)..(906): n is a, c, g, or t
  misc_feature (910)..(910): n is a, c, g, or t
  misc_feature (917)..(917): n is a, c, g, or t
  misc_feature (944)..(944): n is a, c, g, or t
  misc_feature (957)..(957): n is a, c, g, or t
  misc_feature (969)..(969): n is a, c, g, or t
  misc_feature (977)..(977): n is a, c, g, or t
  misc_feature (999)..(999): n is a, c, g, or t
  misc_feature (1018)..(1018): n is a, c, g, or t
  misc_feature (1020)..(1020): n is a, c, g, or t
  misc_feature (1024)..(1024): n is a, c, g, or t
  misc_feature (1026)..(1026): n is a, c, g, or t
  misc_feature (1028)..(1028): n is a, c, g, or t
  misc_feature (1061)..(1061): n is a, c, g, or t
  misc_feature (1074)..(1074): n is a, c, g, or t
  misc_feature (1087)..(1089): n is a, c, g, or t
  misc_feature (1102)..(1102): n is a, c, g, or t
  misc_feature (1105)..(1105): n is a, c, g, or t
  misc_feature (1112)..(1112): n is a, c, g, or t
  misc_feature (1133)..(1134): n is a, c, g, or t
  misc_feature (1158)..(1158): n is a, c, g, or t
  misc_feature (1182)..(1182): n is a, c, g, or t
  misc_feature (1189)..(1189): n is a, c, g, or t
  misc_feature (1202)..(1202): n is a, c, g, or t
  misc_feature (1212)..(1212): n is a, c, g, or t
  misc_feature (1216)..(1217): n is a, c, g, or t
  misc_feature (1221)..(1222): n is a, c, g, or t
  misc_feature (1229)..(1229): n is a, c, g, or t
naattagagaaanttactatgagaggatcgcatcaccatcaccatcacggatcctatttaggtgacactatagaatcgtcgacccacgcgtccgggcccacacactcaccgagaaccgcgtcctgcagaactccaggcaccccttcctcacagccctgaagtactctttccagacccacgaccgcctctgctttgtcatggagtacgccaacgggggcgagctgttcttccacctgtcccgggaacgtgtgttctccgaggaccgggcccgcttctatggcgctgagattgtgtcagccctggactacctgcactcggagaagaacgtggtgtaccgggacctcaagctggagaacctcatgctggacaaggacgggcacattaagatcacagacttcgggctgtgcaaggaggggatcaaggacggtgccaccatgaagaccttttgcggcacacctgagtacctggcccccgaggtgctggaggacaatgactacggccgtgcagtggactggtgggggctgggcgtggtcatgtacgagatgatgtgcggtcgcctgcccttctacaaccaggaccatgagaagctttttgagctcatcctcatggaggagatccgcttcccgcgcacgcttggtcccgaggccaagtccttgctttcagggctgctcaagaaggaccccaagcagaggcttggcgggggctccgaggacgccaaggagatcatgcagcatcgcttctttgccggtatcgtgtggcagcacgtgtacganaagaagctcagcccacccttcaagccccaggtcacgtcggagactgacaccaggtattttgatgaggagttcacggcccnaaatgatcaccatcacaccacctgaccaanatgacagcatggantgtgtgganagcnagcgcanggccccactttcccccagttttcctanttcggcaagcggnacggcctgaagnggcggtgnactgccctggacaaaaacttgnaaggaatggaaaaagcggncntccngncnatgatcctggaatttaaagggttttttattttnccgggggcatttnaaaaaaaacccannnttgttccttttcnaancccaaangggaaaaaaacttttttttgnntttgggaaaaaaccctcccccccnaagggggggtaagggaaaaaaaanatatccnggggggttttaanttttttttcncccnntttnntttcccnggggggg

SEQ ID NO: 314 - DNA, 1125 bp, Homo Sapiens
  misc_feature (232)..(232): n is a, c, g, or t
  misc_feature (475)..(475): n is a, c, g, or t
  misc_feature (553)..(553): n is a, c, g, or t
  misc_feature (596)..(596): n is a, c, g, or t
  misc_feature (608)..(608): n is a, c, g, or t
  misc_feature (635)..(635): n is a, c, g, or t
  misc_feature (649)..(649): n is a, c, g, or t
  misc_feature (657)..(657): n is a, c, g, or t
  misc_feature (715)..(715): n is a, c, g, or t
  misc_feature (730)..(730): n is a, c, g, or t
  misc_feature (735)..(735): n is a, c, g, or t
  misc_feature (747)..(747): n is a, c, g, or t
  misc_feature (752)..(752): n is a, c, g, or t
  misc_feature (765)..(766): n is a, c, g, or t
  misc_feature (779)..(779): n is a, c, g, or t
  misc_feature (787)..(788): n is a, c, g, or t
  misc_feature (827)..(828): n is a, c, g, or t
  misc_feature (843)..(843): n is a, c, g, or t
  misc_feature (845)..(845): n is a, c, g, or t
  misc_feature (861)..(861): n is a, c, g, or t
  misc_feature (882)..(882): n is a, c, g, or t
  misc_feature (886)..(886): n is a, c, g, or t
  misc_feature (889)..(889): n is a, c, g, or t
  misc_feature (899)..(900): n is a, c, g, or t
  misc_feature (908)..(909): n is a, c, g, or t
  misc_feature (911)..(913): n is a, c, g, or t
  misc_feature (929)..(929): n is a, c, g, or t
  misc_feature (933)..(933): n is a, c, g, or t
  misc_feature (942)..(942): n is a, c, g, or t
  misc_feature (948)..(948): n is a, c, g, or t
  misc_feature (956)..(957): n is a, c, g, or t
  misc_feature (970)..(970): n is a, c, g, or t
  misc_feature (976)..(976): n is a, c, g, or t
  misc_feature (985)..(986): n is a, c, g, or t
  misc_feature (991)..(991): n is a, c, g, or t
  misc_feature (1001)..(1001): n is a, c, g, or t
  misc_feature (1006)..(1006): n is a, c, g, or t
  misc_feature (1008)..(1008): n is a, c, g, or t
  misc_feature (1016)..(1016): n is a, c, g, or t
  misc_feature (1024)..(1024): n is a, c, g, or t
  misc_feature (1032)..(1032): n is a, c, g, or t
  misc_feature (1041)..(1042): n is a, c, g, or t
  misc_feature (1049)..(1050): n is a, c, g, or t
  misc_feature (1052)..(1052): n is a, c, g, or t
  misc_feature (1054)..(1054): n is a, c, g, or t
  misc_feature (1065)..(1065): n is a, c, g, or t
  misc_feature (1067)..(1067): n is a, c, g, or t
  misc_feature (1075)..(1075): n is a, c, g, or t
  misc_feature (1078)..(1078): n is a, c, g, or t
  misc_feature (1090)..(1090): n is a, c, g, or t
  misc_feature (1094)..(1094): n is a, c, g, or t
  misc_feature (1104)..(1105): n is a, c, g, or t
  misc_feature (1116)..(1117): n is a, c, g, or t
gaatagagagattactatgagaggatcgcatcaccatcaccatcacggatcctatttaggtgacactatagaatcgtcgacccacgcgtccgggtttggttgtgagatcgagaataacagaagcagcggagcattctggaaatattactatgatggaaaggactacattgaattcaacaaagaaatcccagcctgggtccccttcgacccagcagcccagataaccaagcanaagtgggaggcagaaccagtctacgtgcagcgggccaaggcttacctggaggaggagtgccctgcgactctgcggaaatacctgaaatacagcaaaaatatcctggaccggcaagatcctccctctgtggtggtcaccagccaccaggccccaggagaaaagaagaaactgaagtgcctggcctacgacttctacccagggaaaattgatgtgcactggactcgggccggcgaggtgcaggancctgagttacggggagatgttcttcacaatggaaatggcacttaccagtcctgggtggtggtggcagtgcccccgcangacacagccccctactcctgccacgtgcagcacagcagcctgncccagcccctcntggtgccctgggaggccagctaggaancaagggttggaggnaatgtggnatctcaaacccagtaagctgcccttcctgcctgatgtgggagctgaaccacagaaatncacatgtcaatgganccacnaggccctgaagnagcantgtgggggggacnnaacaggaggttgnatttggannaccgaaagactgggatgcctgtcttgaagtataacttgnnacccaaaaaaaatcntntcacccttgagccccncccccaccccccttggtctantctngtnagaagctaannaaaataanncnnnccctcctttccctaancaanaaaaatgantaatanactaaaannttattttctactnagggcnggccccccnnccatnaaggagtccncaatnanatcttaantcaccttnatctttgncaccctgtnnaaaaaanncncnaaattgactcncnaacctccnttncgaattgttttnaaanactctcgttnngccccggcgtnnattttttt

SEQ ID NO: 315 - DNA, 1155 bp, Homo Sapiens
  misc_feature (1)..(1): n is a, c, g, or t
  misc_feature (911)..(911): n is a, c, g, or t
  misc_feature (928)..(928): n is a, c, g, or t
  misc_feature (932)..(932): n is a, c, g, or t
  misc_feature (937)..(937): n is a, c, g, or t
  misc_feature (958)..(958): n is a, c, g, or t
  misc_feature (964)..(964): n is a, c, g, or t
  misc_feature (991)..(991): n is a, c, g, or t
  misc_feature (1017)..(1017): n is a, c, g, or t
  misc_feature (1080)..(1080): n is a, c, g, or t
  misc_feature (1091)..(1091): n is a, c, g, or t
  misc_feature (1098)..(1100): n is a, c, g, or t
  misc_feature (1102)..(1102): n is a, c, g, or t
  misc_feature (1108)..(1108): n is a, c, g, or t
  misc_feature (1116)..(1116): n is a, c, g, or t
  misc_feature (1122)..(1122): n is a, c, g, or t
  misc_feature (1124)..(1124): n is a, c, g, or t
  misc_feature (1126)..(1126): n is a, c, g, or t
  misc_feature (1139)..(1139): n is a, c, g, or t
  misc_feature (1147)..(1147): n is a, c, g, or t
  misc_feature (1152)..(1152): n is a, c, g, or t
  misc_feature (1154)..(1155): n is a, c, g, or t
naatagaggaaattactatgaagaggatcgcatcaccatcaccattcacggatcctatttaggtgacactatagaatcgtcgacccacgcgtccgcggacgcgtgggccgccctcgcccggcctgtcagcgctgctctccgccgcagcttcagcacctcggcccagaacaatgctaaagtagctgtgctaggggcctctggaggcatcgggcagccactttcacttctcctgaagaacagccccttggtgagccgcctgaccctctatgatatcgcgcacacacccggagtggccgcagatctgagccacatcgagaccaaagccgctgtgaaaggctacctcggacctgaacagctgcctgactgcctgaaaggttgtgatgtggtagttattccggctggagtccccagaaagccaggcatgacccgggacgacctgttcaacaccaatgccacgattgtggccaccctgaccgctgcctgtgcccagcactgcccggaagccatgatctgcgtcattgccaatccggttaattccaccatccccatcacagcagaagttttcaagaagcatggagtgtacaaccccaacaaaatcttcggcgtgacgaccctggacatcgtcagagccaacacctttgttgcagagctgaagggtttggatccagctcgagtcaacgtccctgtcattggtggccatgctgggaagaccatcatccccctgatctctcagtgcacccccaaggtggactttccccaggaccagctgacagcactcactgggcggatccaggaggccggcacggaggtggtcaaggctaaagccggagcaggctctgccaccctctccatggcgtatgccggcgcccgctttgtcttctcccttgtggatgcaatgaatggaaaggaangggttgtggaatgttcnttcnttaantcacaggaaacggaatgtacntacttntccacaccgctgctgcttgggaaaaanggcatcgaaaaaaacctggggcatcngcaaaattttcttttttgaagaaaaaatgatttcgaatgccatccccgaactgaaggcctccntcaaaaagggnaaaattnnngnaaaacntgaatgancccttntnangggggccattttnttattttnaaggntnn

SEQ ID NO: 316 - DNA, 1107 bp, Homo Sapiens
  misc_feature (905)..(905): n is a, c, g, or t
  misc_feature (929)..(929): n is a, c, g, or t
  misc_feature (967)..(967): n is a, c, g, or t
  misc_feature (1010)..(1010): n is a, c, g, or t
  misc_feature (1034)..(1034): n is a, c, g, or t
  misc_feature (1037)..(1037): n is a, c, g, or t
  misc_feature (1039)..(1039): n is a, c, g, or t
  misc_feature (1069)..(1069): n is a, c, g, or t
  misc_feature (1076)..(1076): n is a, c, g, or t
  misc_feature (1083)..(1083): n is a, c, g, or t
  misc_feature (1087)..(1092): n is a, c, g, or t
  misc_feature (1094)..(1094): n is a, c, g, or t
  misc_feature (1096)..(1107): n is a, c, g, or t
caatagagaaaattactatgagaggatcgcatcaccatcaccatcacggatcctatttaggtgacactatagaatcgtcgacccacgcgtccgtcgcactctccttgaggcgccggttgccggccacaacccttggcggagcctgcctgcaggcctcccgaggagcccagacagctgcagccacagctccccgtatcaagaaatttgccatctatcgatgggacccagacaaggctggagacaaacctcatatgcagacttatgaagttgaccttaataaatgtggccccatggtattggatgctttaatcaagattaagaatgaagttgactctactttgaccttccgaagatcatgcagagaaggcatctgtggctcttgtgcaatgaacatcaatggaggcaacactctagcttgcacccgaaggattgacaccaacctcaataaggtctcaaaaatctaccctcttccacacatgtatgtgataaaggatcttgttcccgatttgagcaacttctatgcacagtacaaatccattgagccttatttgaagaagaaggatgaatctcaggaaggcaagcagcagtatctgcagtccatagaagagcgtgagaaactggacgggctctacgagtgcattctctgtgcctgctgtagcaccagctgccccagctactggtggaacggagacaaatatctggggcctgcagttcttatgcaggcctatcgctggatgattgactccagagatgacttcacagaggagcgcctggccaagctgcaggacccattctctctataccgctgccacaccatcatgaactgcacaaggacctgtcctaagggtctgaatccagggaaagctattgcagagatcaagaaaatgatggcaacctataagganaaaaaaagcttcagttttaactgntttccatgctaaacatgatttataacccagcctcaaanctgaaaaataatttatatctaatttgaatttcctttaaaaatnttgggttttccatgaaatacagcntgntntaataaaaattttaaaaaaaaaaatggttnttccacnttttttnaccnnnnnnanannnnnnnnnnnn

SEQ ID NO: 317 - DNA, 1178 bp, Homo Sapiens
  misc_feature (890)..(890): n is a, c, g, or t
  misc_feature (913)..(913): n is a, c, g, or t
  misc_feature (934)..(934): n is a, c, g, or t
  misc_feature (941)..(941): n is a, c, g, or t
  misc_feature (951)..(951): n is a, c, g, or t
  misc_feature (954)..(954): n is a, c, g, or t
  misc_feature (966)..(966): n is a, c, g, or t
  misc_feature (989)..(989): n is a, c, g, or t
  misc_feature (999)..(999): n is a, c, g, or t
  misc_feature (1003)..(1003): n is a, c, g, or t
  misc_feature (1005)..(1005): n is a, c, g, or t
  misc_feature (1016)..(1016): n is a, c, g, or t
  misc_feature (1025)..(1025): n is a, c, g, or t
  misc_feature (1037)..(1037): n is a, c, g, or t
  misc_feature (1040)..(1040): n is a, c, g, or t
  misc_feature (1043)..(1043): n is a, c, g, or t
  misc_feature (1056)..(1056): n is a, c, g, or t
  misc_feature (1059)..(1059): n is a, c, g, or t
  misc_feature (1061)..(1061): n is a, c, g, or t
  misc_feature (1064)..(1064): n is a, c, g, or t
  misc_feature (1068)..(1069): n is a, c, g, or t
  misc_feature (1077)..(1077): n is a, c, g, or t
  misc_feature (1082)..(1082): n is a, c, g, or t
  misc_feature (1087)..(1087): n is a, c, g, or t
  misc_feature (1091)..(1091): n is a, c, g, or t
  misc_feature (1093)..(1093): n is a, c, g, or t
  misc_feature (1098)..(1098): n is a, c, g, or t
  misc_feature (1100)..(1101): n is a, c, g, or t
  misc_feature (1104)..(1104): n is a, c, g, or t
  misc_feature (1126)..(1126): n is a, c, g, or t
  misc_feature (1129)..(1129): n is a, c, g, or t
  misc_feature (1132)..(1132): n is a, c, g, or t
  misc_feature (1144)..(1144): n is a, c, g, or t
  misc_feature (1156)..(1156): n is a, c, g, or t
  misc_feature (1165)..(1165): n is a, c, g, or t
  misc_feature (1168)..(1168): n is a, c, g, or t
  misc_feature (1177)..(1177): n is a, c, g, or t
gaatagagaaattactatgagaggatcgcatcaccatcaccatcacggatcctatttaggtgacactatagaatcgtcgacccacgcgtccgcccacgcgtccgcccacgcgtccgaaggacttcccagacgatgtcatccagtttgcgcggaaccaccccctcatgtacaactctgtcctgcccactggggggcgccctcttttcctacaagttggagccaattacaccttcactcaaattgccgcggaccgggttgcagccgctgacggacactatgacgtcctcttcattggcacagacgttggcacggtgctgaaggtgatctcggtccccaagggcagtaggcccagcgcagaggggctgctcctggaggagctgcacgtgtttgaggactcggccgctgtcaccagcatgcaaatttcttccaagaggcaccagctgtacgtagcctcgcggagcgcggtggcccagatcgcgttgcaccgctgcgctgcccacggccgcgtctgcaccgaatgctgtctggcgcgtgacccctactgcgcctgggacggggtcgcgtgcacgcgcttccagcccagtgccaagaggcggttccggcggcaagacgtaaggaatggcgaccccagcacgttgtgctccggagactcgtctcgtcccgcgctgctggaacacaaggtgttcggcgtggagggcagcagcgcctttctggagtgtgagccccgctcgctgcaggcgcgcgtggagtggactttccagcgcgcaggggtgacagcccacacccaggtgctggcagaggagcgcaccgagcgcaccgcccggggactactgctgcgcaggctgcggcgccgggactcgggcgtgtacttgtgcgccgccgtcgagcanggctttacgcaaccgctgcgtcncctgtcgctgcacgtgttgantgctacncaggccgaangantggcgcgggccnaagaagctgcgcccgccgcgccnccgggccccnaaantntggtacgggantttttgcanctggtggaaccnggncgnaagtggaaacccnaantnccntggnnatgtgccncccgnaaacntggncntgaantnntgnccctgggaattcccgaaaaaanggnccntaaccggaaganccccccccctgnaaccccccnctnaaagggggnc

SEQ ID NO: 318 - DNA, 918 bp, Homo Sapiens
tgagaggtcgcatcaccatcaccatcacggatcctatttaggtgacactatagaatcgtcgacccacgcgtccgatgctctgcactcagctctggggggcacaaagaagaaaaagaagactattgtgactgatgttttccaggggtccatgaggatcttcactaaaaagcttccccatcctgatctgccagcagaagaaaaagagcagttgctccataatgacgagtaccaggagacaatggtggagtccacttttatgtacctgacgctggaccttcctactgcccccctctacaaggacgagaaggagcagctcatcattccccaagtgccactcttcaacatcctggctaagttcaatggcatcactgagaaggaatataagacttacaaggagaactttctgaagcgcttccagcttaccaagttgcctccatatctaatcttttgtatcaagagattcactaagaacaacttctttgttgagaagaatccaactattgtcaatttccctattacaaatgtggatctgagagaatacttgtctgaagaagtacaagcagtacacaagaataccacctatgacctcattgccaacatcgtgcatgacggcaagccctccgagggctcctaccggatccacgtgcttcatcatgggacaggcaaatggtatgaattacaagacctccaggtgactgacatccttccccagatgatcacactgtcagaggcttacattcagatttggaagaggcgagataatgatgaaaccaaccagcagggggcttgaaggaggcgtctagggctttgctcccaagggctgtggctgatgatggtaaataagaacacagaagctgtagctgaacacaggctggctggtgggcttcctaggccagcccagcttgtatgggttctggc

SEQ ID NO: 319 - DNA, 1224 bp, Homo Sapiens
  misc_feature (1)..(1): n is a, c, g, or t
  misc_feature (896)..(896): n is a, c, g, or t
  misc_feature (903)..(903): n is a, c, g, or t
  misc_feature (908)..(908): n is a, c, g, or t
  misc_feature (913)..(913): n is a, c, g, or t
  misc_feature (919)..(919): n is a, c, g, or t
  misc_feature (923)..(923): n is a, c, g, or t
  misc_feature (929)..(929): n is a, c, g, or t
  misc_feature (980)..(980): n is a, c, g, or t
  misc_feature (996)..(996): n is a, c, g, or t
  misc_feature (1004)..(1004): n is a, c, g, or t
  misc_feature (1017)..(1017): n is a, c, g, or t
  misc_feature (1019)..(1019): n is a, c, g, or t
  misc_feature (1029)..(1029): n is a, c, g, or t
  misc_feature (1032)..(1032): n is a, c, g, or t
  misc_feature (1039)..(1039): n is a, c, g, or t
  misc_feature (1052)..(1052): n is a, c, g, or t
  misc_feature (1070)..(1070): n is a, c, g, or t
  misc_feature (1076)..(1076): n is a, c, g, or t
  misc_feature (1080)..(1080): n is a, c, g, or t
  misc_feature (1086)..(1086): n is a, c, g, or t
  misc_feature (1092)..(1092): n is a, c, g, or t
  misc_feature (1097)..(1097): n is a, c, g, or t
  misc_feature (1100)..(1100): n is a, c, g, or t
  misc_feature (1112)..(1112): n is a, c, g, or t
  misc_feature (1117)..(1117): n is a, c, g, or t
  misc_feature (1120)..(1120): n is a, c, g, or t
  misc_feature (1128)..(1128): n is a, c, g, or t
  misc_feature (1136)..(1136): n is a, c, g, or t
  misc_feature (1148)..(1148): n is a, c, g, or t
  misc_feature (1165)..(1165): n is a, c, g, or t
  misc_feature (1168)..(1168): n is a, c, g, or t
  misc_feature (1192)..(1192): n is a, c, g, or t
  misc_feature (1194)..(1194): n is a, c, g, or t
  misc_feature (1196)..(1196): n is a, c, g, or t
  misc_feature (1202)..(1202): n is a, c, g, or t
  misc_feature (1204)..(1204): n is a, c, g, or t
  misc_feature (1213)..(1215): n is a, c, g, or t
  misc_feature (1217)..(1224): n is a, c, g, or t
ntagagaaattactatgagaggatcgcatcaccatcaccatcacggatcctatttaggtgacactatagaatcgtcgacccacgcgtccgatggcggcggcggcggcggcggctgcagctacgaacgggaccggaggaagcagcgggatggaggtggatgcagcagtagtccccagcgtgatggcctgcggagtgactgggagtgtttccgtcgctctccatccccttgtcattctcaacatctcagaccactggatccgcatgcgctcccaggaggggcggcctgtgcaggtgattggggctctgattggcaagcaggagggccgaaatatcgaggtgatgaactcctttgagctgctgtcccacaccgtggaagagaagattatcattgacaaggaatattattacaccaaggaggagcagtttaaacaggtgttcaaggagctggagtttctgggttggtataccacaggggggccacctgacccctcggacatccacgtccataagcaggtgtgtgagatcatcgagagccccctctttctgaagttgaaccctatgaccaagcacacagatcttcctgtcagcgtttttgagtctgtcattgatataatcaatggagaggccacaatgctgtttgctgagctgacctacactctggccacagaggaagcggaacgcattggtgtagaccacgtagcccgaatgacagcaacaggcagtggagagaactccactgtggctgaacacctgatagcacagcacagcgccatcaagatgctgcacagccgcgtcaagctcatcttggagtacgtcaaggcctctgaagcgggagaggtcccctttaatcatgaaatcctgcgggaggcctatgctctgtgtcactgtctcccggntgctcancacanacaanttcaanacanattttnatgatcaatgcaacgacgtggggctcatggcctacctcggcaccatcaccnaaaacgtgcaacaccntgaaccantttgtgaaaaaantncaatgtcctntanaaccaanaaggcatcggcangaaaatgcccggggctcntttttntganaaaggntacttnaaggnctnaatgaaaggggntcagncanttttcccnaaaggganggcccctacccnttctttgaaaaaaaccnctntttttaaaaaaagggaacaccccntnancccccntnaaaaaaaannnannnnnnnn

SEQ ID NO: 320 - DNA, 856 bp, Homo Sapiens
  misc_feature (499)..(499): n is a, c, g, or t
  misc_feature (556)..(556): n is a, c, g, or t
  misc_feature (589)..(589): n is a, c, g, or t
  misc_feature (618)..(618): n is a, c, g, or t
  misc_feature (637)..(637): n is a, c, g, or t
  misc_feature (656)..(656): n is a, c, g, or t
  misc_feature (660)..(660): n is a, c, g, or t
  misc_feature (665)..(665): n is a, c, g, or t
  misc_feature (673)..(673): n is a, c, g, or t
  misc_feature (685)..(685): n is a, c, g, or t
  misc_feature (694)..(694): n is a, c, g, or t
  misc_feature (703)..(703): n is a, c, g, or t
  misc_feature (724)..(724): n is a, c, g, or t
  misc_feature (727)..(727): n is a, c, g, or t
  misc_feature (732)..(732): n is a, c, g, or t
  misc_feature (742)..(742): n is a, c, g, or t
  misc_feature (745)..(745): n is a, c, g, or t
  misc_feature (749)..(749): n is a, c, g, or t
  misc_feature (757)..(757): n is a, c, g, or t
  misc_feature (766)..(766): n is a, c, g, or t
  misc_feature (768)..(768): n is a, c, g, or t
  misc_feature (783)..(783): n is a, c, g, or t
  misc_feature (785)..(786): n is a, c, g, or t
  misc_feature (801)..(801): n is a, c, g, or t
  misc_feature (803)..(804): n is a, c, g, or t
  misc_feature (817)..(818): n is a, c, g, or t
  misc_feature (829)..(829): n is a, c, g, or t
  misc_feature (833)..(833): n is a, c, g, or t
  misc_feature (837)..(837): n is a, c, g, or t
  misc_feature (840)..(841): n is a, c, g, or t
  misc_feature (843)..(843): n is a, c, g, or t
  misc_feature (848)..(848): n is a, c, g, or t
  misc_feature (850)..(850): n is a, c, g, or t
  misc_feature (853)..(854): n is a, c, g, or t
  misc_feature (856)..(856): n is a, c, g, or t
atttagagaaaattacttatgagaggatcgcatcaccatcaccatcacggtatcctatttaggtgacactatagaatcgtcgacccacgcgtccgcgggagggcagggccgacggacggcgggcggcggcggcggtggcggcgctggagtcggcgcgggtgctggcgccatggaggccgagcggggtcccgagcgccggcctgcggagcgtagcagcccgggccagacgccggaggagggcgcgcaggccttggccgagttcgcggcgctgcacggcccggcgctgcgcgcttcgggggtccccgaacgttactggggccgcctcctgcacaagctggagcacgaggttttcgacgctggggaagtgtttgggatcatgcaagtggaggaggtagaagaggaggaggacgaggcagcccgggaggtgcggaagcagcagcccaacccggggaacgagctgtgctacaaggtcatcgtgaccagagagagcgggctccangcagcccaccccaacagcatcttcctcatcgaccacgcctggacgtgccgtgtggancatgcgcgccagcagctgcaacaggtgcccggnctgctgcaccgcatggccaacctgatggncattgatttccacggtganctgcccagtacataagctntggncctgntgctggangagatgtggaanttcaaccanacctactanctggcccatgggacagctganganaagangccggtgtgntanatcntggactanttcagttcncngatccatcaatccgnanntgcccaaacttcacnannccaaccttctttnnaaaattgccanaaancaanttnncntaacncnctnntn

SEQ ID NO: 321 - DNA, 811 bp, Homo Sapiens
atgagaggatcgcatcaccatcaccatcacggatcctatttaggtgacactatagaatcgtcgacccacgcgtccggtcgagttgcttggcggtcgtggttccggaggttcctcgggatgtcggtggccttcgtaccggactggctgaggggcaaggcggaagtcaatcaagagactatccagcggctccttgaggagaatgaccagctgatccgctgtattgtggagtatcagaacaagggccgcgggaacgagtgcgtgcagtaccagcatgtgttacatagaaatctcatttatttggctaccattgcagatgccagtccaaccagcacttcaaaagcaatggaataatctttcaaaagcaatagaataatcttccatttggctgtcgtgaggagtaattgaatgtaatccatctcttacaaaatggagacagggtctttaccaactcaactggttaaaacatgaatgaaacctctgtggctctttcgaaacgtgaaaatgtgaagaaagctactaacttagctgtattctcatgtaaatattttttaaataattaagcaaatccctcaataagttgagcccaggtgtcctctttcctgaacttggagcatgtttggataacaaagacatcactgggatgttcaagtctactttttagtttcaacctgaagaggaaactcagtaggtgttgggcaggaattggtgagattcctgacttgataccttgctaaatggacatgtaactgtgtgctccttcctatcagtttgtaaatgtggtccccctgactgctgttttcagattgctttg

SEQ ID NO: 322 - DNA, 989 bp, Homo Sapiens
  misc_feature (918)..(918): n is a, c, g, or t
  misc_feature (953)..(953): n is a, c, g, or t
  misc_feature (964)..(964): n is a, c, g, or t
  misc_feature (968)..(989): n is a, c, g, or t
gagaaattactatgagaggatcgcatcaccatcaccatcacggatcctatttaggtgacactatagaatcgtcgacccacgcgtccgggggtaacaagatggcgaccgagacggtggagctccataagctaaagcttgccgaactaaagcaagaatgtcttgctcgtggtttggagaccaagggaataaagcaagatcttatccacagactccaggcatatcttgaagaacatgctgaagaggaggcaaatgaagaagatgtactgggagatgaaacagaggaagaagaaacaaagcccattgagctccctgtcaaagaggaagaaccccctgaaaaaactgttgatgtggcagcagagaagaaagtggtgaaaattacatctgaaataccacagactgagagaatgcagaagagggctgaacgattcaatgtacctgtgagcttggagagtaagaaagctgctcgggcagctaggtttgggatttcttcagttccaacaaaaggtctgtcatctgataacaaacctatggttaacttggataagctgaaggaaagagctcaaagatttggtttgaatgtctcttcaatctccagaaagtctgaagatgatgagaaactgaaaaagaggaaggagcgatttgggattgtcacaagttcagctggaactggaaccacagaggatacagaggcaaagaagaggaaaagagcagagcgctttgggattgcctgatgaaaagttcctgatactttctgttctccagtgttttccatttctctccttcttcttggtcacatatatgcctaaatgcacagtcatgtgcctacgtcctgcctcgcaatgagggagcatgtaccccaggtacatccatgaactgcggcagcagtttgacttattgctgtttcacctttaaggttgntggggttttggtttttgattatgttgcttggttantaaaaaaaaanttgnnnnnnnnnnnnnnnnnnnnnn

SEQ ID NO: 323 - DNA, 909 bp, Homo Sapiens
tgagaggatcgcatcaccatcaccatcacggatcctatttaggtgacactatagaatcgtcgacccacgcgtccgggcgcgtgctgcaacccgcgcccgcttcggagagagaaatgttggggtgcagcttcaagcttaggaccacccaccatgcctatccaggtgctgaagggcctgaccatcactcattaagaacagaggaggctgcctgttactcctggtgttgcatccctccagacactctgctgtttcctgcctaggcgtggctgcagccatggctaggaaagcgctgccacccacccacctgggccagagctggttctgctcctgctgcagggacactgagctggctatctcggcgcttcgggcaagaactgcaacaggctctcctgggtcctgcaggtgtacagccgggcccctgccttgtgcctcagctctcgagagctgctgctgccgggtgacctgatccaacctgataaggtgccatcttcagctaccactgcaaggccctgagggcaacagcagcacggcactgcccacccggctgctgatggcctggtgccagctgggagtcctcccggcacttcgaggccactgagccacccttccagccccagcccaccatggacaggggtatccagcttcctcctcaacctcgtcctctgcccctgagccagtgacgcccaaggacatgcctgttacccaggtcctgtaccagcactagctggtcaagggcatgacagtgctggaggccgtcttggagatccaggccatcactggcagcaggctgctctccatggtgccagggcccgccaggccaccaggctcatgctgggacccaacccagtgcacaaggacttggctgctgagccacacacccaggagaaggtggataagtgggctaccaag

SEQ ID NO: 324 - DNA, 1116 bp, Homo Sapiens
  misc_feature (826)..(826): n is a, c, g, or t
  misc_feature (840)..(840): n is a, c, g, or t
  misc_feature (845)..(845): n is a, c, g, or t
  misc_feature (875)..(875): n is a, c, g, or t
  misc_feature (886)..(886): n is a, c, g, or t
  misc_feature (904)..(904): n is a, c, g, or t
  misc_feature (907)..(907): n is a, c, g, or t
  misc_feature (945)..(945): n is a, c, g, or t
  misc_feature (947)..(947): n is a, c, g, or t
  misc_feature (1004)..(1005): n is a, c, g, or t
  misc_feature (1008)..(1008): n is a, c, g, or t
  misc_feature (1015)..(1015): n is a, c, g, or t
  misc_feature (1017)..(1017): n is a, c, g, or t
  misc_feature (1034)..(1035): n is a, c, g, or t
  misc_feature (1039)..(1039): n is a, c, g, or t
  misc_feature (1045)..(1045): n is a, c, g, or t
  misc_feature (1056)..(1056): n is a, c, g, or t
  misc_feature (1061)..(1061): n is a, c, g, or t
  misc_feature (1073)..(1073): n is a, c, g, or t
  misc_feature (1079)..(1080): n is a, c, g, or t
  misc_feature (1097)..(1097): n is a, c, g, or t
  misc_feature (1101)..(1105): n is a, c, g, or t
  misc_feature (1109)..(1109): n is a, c, g, or t
  misc_feature (1111)..(1112): n is a, c, g, or t
  misc_feature (1115)..(1115): n is a, c, g, or t
aggaaattaactatgagaggatcgcatcaccattcaccatcacggatcctatttaggtgacactatagaatcgtcgacccacgcgtccgggccagccccttgtcctctgccttctgctggcagaggagcagctggactggggccttttggcacagcagccggtgtctcctgcgcccgcctcccccatggccccatgcagccccaggggcttcccccctgcccatggagtagagcccgagatcctggccactatgccagttctgacctcgcatccccctaccccgagcccatgcagtctgggaacatgccgccttctctccagcctctgtgcctttgttccaggtggtctcaccctcctgtccctggctgggctaggtggtcctgtccaggctcctgcagcgcccccctcactttgacactggactaggatgcagcctcccttctgtgtccccttgagggtaccctgggtcccctcatcaggggcagaggcatgaaagagtcggggctggatggccaggggcttctgggcccgacgcctagtgcagcccctggggtcgtggtttgacatttgtctgcctggtgcaaacaaggaatccttgcctttaaggtgacaggccctccacaggcttccagacttgaaggaaaaggtttaagaaagaaaacaaaaccaacagttagtggagtcaaagcccagacactgtaaatagaaccccctccaccaccccccgccgcccagcatcctacctggactgcggtgctacgagggcctgcgggccttttgctgtgtgccaaccctccctgtaagtctatttaaaaaacatcgacnaaacattgaaaatntgtgnaacgtttttgaaaaagctacagcttccaancaaccaaaaancaaactgtttgttttggnaanaacggtcctgatgtaaaaaccttgaattgaaaattcantngctcaccttgaaaacgttaattcaaaaacccaaaggaaatggctggtccccatcccnnatntgggctngngtggaacctcaaccttnntttntgtggnaaattttaatnaaaanttggtccccccnaaaatnnaacaaaaaaaaaaaaanaaannnnnaaanannaana

SEQ ID NO: 325 - DNA, 816 bp, Homo Sapiens
  misc_feature (68)..(68): n is a, c, g, or t
  misc_feature (76)..(76): n is a, c, g, or t
  misc_feature (79)..(79): n is a, c, g, or t
  misc_feature (101)..(101): n is a, c, g, or t
  misc_feature (109)..(109): n is a, c, g, or t
  misc_feature (128)..(128): n is a, c, g, or t
  misc_feature (147)..(147): n is a, c, g, or t
  misc_feature (224)..(224): n is a, c, g, or t
  misc_feature (254)..(254): n is a, c, g, or t
  misc_feature (323)..(323): n is a, c, g, or t
  misc_feature (337)..(337): n is a, c, g, or t
  misc_feature (359)..(359): n is a, c, g, or t
  misc_feature (373)..(373): n is a, c, g, or t
  misc_feature (414)..(414): n is a, c, g, or t
  misc_feature (447)..(447): n is a, c, g, or t
  misc_feature (449)..(450): n is a, c, g, or t
  misc_feature (453)..(453): n is a, c, g, or t
  misc_feature (455)..(455): n is a, c, g, or t
  misc_feature (499)..(499): n is a, c, g, or t
  misc_feature (539)..(539): n is a, c, g, or t
  misc_feature (552)..(552): n is a, c, g, or t
  misc_feature (554)..(554): n is a, c, g, or t
  misc_feature (557)..(557): n is a, c, g, or t
  misc_feature (572)..(572): n is a, c, g, or t
  misc_feature (590)..(590): n is a, c, g, or t
  misc_feature (611)..(611): n is a, c, g, or t
  misc_feature (613)..(613): n is a, c, g, or t
  misc_feature (618)..(618): n is a, c, g, or t
  misc_feature (620)..(620): n is a, c, g, or t
  misc_feature (627)..(627): n is a, c, g, or t
  misc_feature (640)..(640): n is a, c, g, or t
  misc_feature (656)..(656): n is a, c, g, or t
  misc_feature (662)..(662): n is a, c, g, or t
  misc_feature (675)..(675): n is a, c, g, or t
  misc_feature (687)..(688): n is a, c, g, or t
  misc_feature (694)..(695): n is a, c, g, or t
  misc_feature (706)..(706): n is a, c, g, or t
  misc_feature (709)..(710): n is a, c, g, or t
  misc_feature (718)..(718): n is a, c, g, or t
  misc_feature (727)..(727): n is a, c, g, or t
  misc_feature (746)..(746): n is a, c, g, or t
  misc_feature (761)..(761): n is a, c, g, or t
  misc_feature (769)..(769): n is a, c, g, or t
  misc_feature (775)..(775): n is a, c, g, or t
  misc_feature (783)..(783): n is a, c, g, or t
  misc_feature (794)..(794): n is a, c, g, or t
  misc_feature (798)..(798): n is a, c, g, or t
  misc_feature (800)..(800): n is a, c, g, or t
  misc_feature (806)..(806): n is a, c, g, or t
  misc_feature (809)..(809): n is a, c, g, or t
  misc_feature (812)..(812): n is a, c, g, or t
tagagaaattactatgagaggatcgcatcaccatcaccatcacggaatcctatttaggatgacactantagaatcntcnacccacgcgctccggcgatgancgcagggncggcgcagcagctgcgggngcacggaggcccgcgctgntagtcactcctcccggcctcggcgcgcttgtcccgggcagcggcccgggcccgctgcagccgccgccggcgccgaanttgggctcgggaagccggcggaccgcgtcntgcgccggagcaggggcatggtctagtggcccagtcaggacgcggaaacactccctggaggttctgacncactccctctcagnctccgcctggtctctggtgtantcgccgccgccagncgccatgggcaaacagaacagcaagctgcggcccgaggtgntgcaggacctgcgggagaacacggagttcaccnannacnanctgcaggagtggtacaagggcttcctcaaggactgccccaccgnccacctgaccgtggacgagttcaagaagatctacgccaanttcttcccctacngntangcttccaagttcgcngagcacgtcttctgcacnttcgacaccaacggcgacggnancatcnanttccggnagttcatcattgngctgaccgtgacctcncgggtntaagctggagcanaagctcaagtgnnccttcnncatgtacgacntgnnacggcatnggctacatnatacgcagcgagatgctgnagatcgtgcaggccntctacaanatgatntcgtctgngattaaaaatncccngnatgatnaantcncccc

SEQ ID NO: 326 - DNA, 473 bp, Homo Sapiens
tagagaaattactatgagaggatcgcatcaccatcaccatcacggatcctatttaggtgacactatagaatcgtcgacccacgcgtccgatagcgctcacgcaagcatggttaacgtccctaaaacccgccggactttctgtaagaagtgtggcaagcaccaaccccataaagtgacacagtacaagaagggcaaggattctctgtacgcccagggaaagcggcgttatgacaggaagcagagtggctatggtgggcaaactaagccgattttccggaaaaaggctaaaactacaaagaagattgtgctaaggcttgagtgcgttgagcccaactgcagatctaagagaatgctggctattaaaagatgcaagcattttgaactgggaggagataagaagagaaagggccaagtgatccagttctaagtgtcatcttttattatgaagacaataaaatcttgagtttatgttc

SEQ ID NO: 327 - DNA, 938 bp, Homo Sapiens
  misc_feature (2)..(2): n is a, c, g, or t
  misc_feature (424)..(424): n is a, c, g, or t
  misc_feature (626)..(626): n is a, c, g, or t
  misc_feature (674)..(674): n is a, c, g, or t
  misc_feature (681)..(681): n is a, c, g, or t
  misc_feature (730)..(730): n is a, c, g, or t
  misc_feature (762)..(762): n is a, c, g, or t
  misc_feature (799)..(799): n is a, c, g, or t
  misc_feature (801)..(801): n is a, c, g, or t
  misc_feature (836)..(836): n is a, c, g, or t
  misc_feature (850)..(850): n is a, c, g, or t
  misc_feature (864)..(864): n is a, c, g, or t
  misc_feature (868)..(868): n is a, c, g, or t
  misc_feature (876)..(876): n is a, c, g, or t
  misc_feature (884)..(884): n is a, c, g, or t
  misc_feature (887)..(887): n is a, c, g, or t
  misc_feature (891)..(892): n is a, c, g, or t
  misc_feature (894)..(894): n is a, c, g, or t
  misc_feature (899)..(899): n is a, c, g, or t
  misc_feature (902)..(904): n is a, c, g, or t
  misc_feature (912)..(912): n is a, c, g, or t
  misc_feature (931)..(931): n is a, c, g, or t
  misc_feature (933)..(933): n is a, c, g, or t
  misc_feature (938)..(938): n is a, c, g, or t
antagagaaattactatgagaggatcgcatcaccatcaccatcacggatcctatttaggtgacactatagaatcgtcgacccacgcgtccgcaggaagaacgcgagcgtacgggagaatctgggccggcggggcgcagcgagccgcatcgcagctggaggacagccggggtgtgtctgtgtgtgtttgcccgtcggttgaaggccccatcgcccccgggtccccgccctgccccagaaagcgttccccaagagagctaggagtcctgcgcacctggagcgcgctccgcgtccacgcccagagggcgctgcacactcgcgcccgaggactgcctgccccccttcagcccctctcccgggctgcgcctccgcactccgggcccgggcagaagggggtgcgcctcggccccaccacccagggagcanccgagctgaaaggccgggaaccgcggcttgcggggaccacagctcccgaaagcgacgttcggccaccggaggagcgggagccaagcagcaaattgtggctactaatttgccccctgaagatcaagatggctctggggatgactctgacaacttctccggctcaggtgcaggtgctttgcaagatatcaccttgtcacagcanaccccctccacttggaaggacacgcagctcctgacggctattcccacntctccanaacccaccggcctggaggctacagctgcctccacctccaacctgccggntggagaggggcccaaggagggagaggctgtantcctgccaaaaatggagcctggcctcaccgcccaggnancaggaggccaaccccccgacccaaggaaaacacanagcttcccgaaccnttcattaaggcctnaacnaacaaaanccaacaanggnccannanccccnccnnncttccaancccccaaaagggaacatgnancctgn

SEQ ID NO: 328 - DNA, 1312 bp, Homo Sapiens
  misc_feature (815)..(815): n is a, c, g, or t
  misc_feature (820)..(820): n is a, c, g, or t
  misc_feature (831)..(831): n is a, c, g, or t
  misc_feature (890)..(890): n is a, c, g, or t
  misc_feature (920)..(920): n is a, c, g, or t
  misc_feature (926)..(926): n is a, c, g, or t
  misc_feature (935)..(935): n is a, c, g, or t
  misc_feature (954)..(954): n is a, c, g, or t
  misc_feature (969)..(969): n is a, c, g, or t
  misc_feature (981)..(981): n is a, c, g, or t
  misc_feature (988)..(988): n is a, c, g, or t
  misc_feature (993)..(993): n is a, c, g, or t
  misc_feature (999)..(999): n is a, c, g, or t
  misc_feature (1028)..(1028): n is a, c, g, or t
  misc_feature (1041)..(1041): n is a, c, g, or t
  misc_feature (1059)..(1060): n is a, c, g, or t
  misc_feature (1062)..(1062): n is a, c, g, or t
  misc_feature (1069)..(1069): n is a, c, g, or t
  misc_feature (1071)..(1072): n is a, c, g, or t
  misc_feature (1106)..(1106): n is a, c, g, or t
  misc_feature (1116)..(1116): n is a, c, g, or t
  misc_feature (1119)..(1119): n is a, c, g, or t
  misc_feature (1137)..(1137): n is a, c, g, or t
  misc_feature (1139)..(1139): n is a, c, g, or t
  misc_feature (1144)..(1144): n is a, c, g, or t
  misc_feature (1147)..(1147): n is a, c, g, or t
  misc_feature (1160)..(1160): n is a, c, g, or t
  misc_feature (1177)..(1177): n is a, c, g, or t
  misc_feature (1183)..(1183): n is a, c, g, or t
  misc_feature (1187)..(1187): n is a, c, g, or t
  misc_feature (1205)..(1206): n is a, c, g, or t
  misc_feature (1213)..(1213): n is a, c, g, or t
  misc_feature (1243)..(1243): n is a, c, g, or t
  misc_feature (1247)..(1247): n is a, c, g, or t
  misc_feature (1250)..(1251): n is a, c, g, or t
  misc_feature (1256)..(1257): n is a, c, g, or t
  misc_feature (1263)..(1263): n is a, c, g, or t
  misc_feature (1267)..(1267): n is a, c, g, or t
  misc_feature (1276)..(1276): n is a, c, g, or t
  misc_feature (1281)..(1281): n is a, c, g, or t
  misc_feature (1283)..(1283): n is a, c, g, or t
  misc_feature (1294)..(1294): n is a, c, g, or t
  misc_feature (1296)..(1296): n is a, c, g, or t
  misc_feature (1309)..(1309): n is a, c, g, or t
tagagaaattactatgagaggatcgcatcaccatcaccatcacggatcctatttaggtgacactatagaatcgtcgacccacgcgtccgtggacatgctggacccgggtctggatcccgctgcctcggccaccgctgctgccgccgccagccacgacaagggacccgaggcggaggagggcgtcgagctgcaggaaggcggggacggcccaggagcggaggagcagacagcggtggccatcaccagcgtccagcaggcggcgttcggcgaccacaacatccagtaccagttccgcacagagacaaatggaggacaggtgacataccgcgtagtccaggtgactgatggtcagctggacggccagggcgacacagctggcgccgtcagcgtcgtgtccaccgctgccttcgcgggggggcagcaggctgtgacccaggtgggtgtggacggggcagcccagcgcccgggccccgccgctgcctctgtgcccccaggtcctgcagcgcccttcccgctggctgtgatccaaaatcccttcagcaatggtggcagtccggcggccgaggctgtcagcggggaggcacgatttgcctatttcccagcgtccagtgtgggagatactacggctgtgtccgtacagaccacagaccagagcttgcaggctggaggccagttctacgtcatgatgacgccccaggatgtgcttcagacaggaacacagaggacgatcgccccccggacacacccttactctccaaaaattgatggaaccagaacaccccgagatgagaggagaagagcccagcacaacgaantggancggaagcgganggacaagatcaacaactggatcgtccagctttcgaaaatcattccagactgtaacgcanacaacagcaagacgggagcgagtaaagganggatcntgtccaagnctgcgattacatccggganttgcgccaaacaacnagcgcatgcagnaaacttnaaaangccgancgctgcaaatgaaaacaactctgaggcancaaatcagaactnaaaatgaaaagcctgttnnanccagttnannacaaacttgaaatgtggcaaggcaccggaatganccgcacacanaancgcgcgccagcggcttgntnccttncancttaaaaaaaagnaaatgccccccccctcntttttnaaantttaaaaaaagggaaaanntttttgnaaaaggcccccccttccttgaaagaattcncgcnacnnttttnnccttcncccntaacccccnttttntncttgaaaaaananaaaaacccccccnccc

SEQ ID NO: 329 - DNA, 997 bp, Homo Sapiens
  misc_feature (1)..(1): n is a, c, g, or t
  misc_feature (5)..(5): n is a, c, g, or t
  misc_feature (867)..(867): n is a, c, g, or t
  misc_feature (892)..(892): n is a, c, g, or t
  misc_feature (955)..(955): n is a, c, g, or t
  misc_feature (957)..(957): n is a, c, g, or t
  misc_feature (959)..(978): n is a, c, g, or t
  misc_feature (980)..(982): n is a, c, g, or t
  misc_feature (984)..(984): n is a, c, g, or t
  misc_feature (994)..(994): n is a, c, g, or t
naatngagaaattactatgagaggatcgcatcaccatcaccatcacgggatcctatttaggtgacactatagaatcgtcgacccacgcgtccggtcagtactggcgctttgaggatggtgtcctggaccctgattacccccgaaatatctctgacggcttcgatggcatcccggacaacgtggatgcagccttggccctccctgcccatagctacagtggccgggagcgggtctacttcttcaaggggaaacagtactgggagtaccagttccagcaccagcccagtcaggaggagtgtgaaggcagctccctgtcggctgtgtttgaacactttgccatgatgcagcgggacagctgggaggacatcttcgagcttctcttctggggcagaacctctgctggtaccagacagccccagttcattagccgggactggcacggtgtgccagggcaagtggacgcagccatggctggccgcatctacatctcaggcatggcaccccgcccctccttggccaagaaacaaaggtttaggcatcgcaaccgcaaaggctaccgttcacaacgaggccacagccgtggccgcaaccagaactcccgccggccatcccgcgccacgtggctgtccttgttctccagtgaggagagcaacttgggagccaacaactatgatgactacaggatggactggcttgtgcctgccacctgtgaacccatccagagtgtcttcttcttctctggagacaagtactaccgagtcaatcttcgcacacggcgagtggacactgtggaccctccctacccacgctccatcgctcaatactggctggggctgcccagctcctggccatctgtaggagtcagancccacatgggccgggccctctgtanctccctcctcccatctccttcccccagccccaaaaaaaggtcccttaaccccgaaaaaaaaananannnnnnnnnnnnnnnnnnnngnnngnccgcctcccnaaa

SEQ ID NO: 330 - DNA, 976 bp, Homo Sapiens
tgagaggatcgcatcaccatcaccatcacggatcctatttaggtgacactatagaatcgtcgacccacgcgtccgagttcccggtgcacggcgccggcgagctgtgcgtgggccagaacacgtccgacaagggcaccccgacgccctcgctgcttccagagttctggaccagcaaccctcagcacggcggcggagggcaccgtggcggcttcccggggggcgccggcgcgtcggagcgaggcaagttctcctgcccgcgcgccctcaaggtgccctcctacctcaactaccacttcctgggggagaaggactgcggcgcaccttgtgagccgaccaaggtgtatgggctcatgtacttcgggcccgaggagctgcgcttctcgcgcacctggattggcatttggtcagtgctgtgctgcgcctccacgctcttcacggtgcttacgtacctggtggacatgcggcgcttcagctacccggagcggcccatcatcttcttgtccggctgttacacggccgtggccgtggcctacatcgccggcttcctcctggaagaccgagtggtgtgtaatgacaagttcgccgaggacggggcacgcactgtggcgcagggcaccaagaaggagggctgcaccatcctcttcatgatgctctacttcttcagcatggccagctccatctggtgggtgatcctgtcgctcacctggttcctggcggctggcatgaagtggggccacgaggccatcgaagccaactcacagtattttcacctggccgcctgggctgtgccggccatcaagaccatcaccatcctggcgctgggccaggtggacggcgatgtgctgagcggagtgtgcttcgtggggcttaacaacgtggacgcgctgcgtggcttcgtgctggcgcccctcttcgtgtacctgtttatcggcacgtcctttctgctggccggctttgtgtcgctcttccgcatccg

SEQ ID NO: 331 - DNA, 744 bp, Homo Sapiens
  misc_feature (568)..(568): n is a, c, g, or t
  misc_feature (629)..(629): n is a, c, g, or t
  misc_feature (634)..(635): n is a, c, g, or t
  misc_feature (648)..(648): n is a, c, g, or t
  misc_feature (654)..(654): n is a, c, g, or t
  misc_feature (666)..(666): n is a, c, g, or t
  misc_feature (700)..(700): n is a, c, g, or t
  misc_feature (706)..(706): n is a, c, g, or t
  misc_feature (718)..(720): n is a, c, g, or t
  misc_feature (722)..(722): n is a, c, g, or t
  misc_feature (728)..(730): n is a, c, g, or t
  misc_feature (733)..(733): n is a, c, g, or t
  misc_feature (742)..(743): n is a, c, g, or t
atttagagaaattactatgagaggatcgcatcaccatcaccatcacggatcctatttaggtgacactatagaatcgtcgacccacgcgtccgtgcacgtggaccctgtaggccccctggacaaggtgaggaaggccaagatccgagtcaagaccagcagcaaggccaaggtggagtctgaagagccacaggacaatgacttcctcagttgcatgtcccggtgggtggcaggaccttgggggtgggaggggggtgggactggaggtacgggtctccctggtcccggcctgggcagctgagtggtgcctgccgggcggggcaggcgctcgggtctgcctcgctggatcctggcctgctgcctcttcctctccgtgctggtgatgctgtggctgagctgctccaccctggtgaccgcgcctggccagcacctcaagttccagcctctgaccctggagcagcacaagggcttcatgatggagcccgattggcccctgtacccgccgccgtcccacgcctgtgaggacagcctaccaccctacaagctgaagctggacctgaccaagctgtangcctccactggccccatcactgccaactgcagggggcccctcgggcctcacttgccctgancccannagtccaagggcanggtggntccagcgttgancccctccacccccaaatccttcctctcctcccantcccancccttgccccannnantcctgnnnacncatgccccnnc

SEQ ID NO: 332 - DNA, 1169 bp, Homo Sapiens
  misc_feature (821)..(821): n is a, c, g, or t
  misc_feature (930)..(930): n is a, c, g, or t
  misc_feature (948)..(948): n is a, c, g, or t
  misc_feature (956)..(956): n is a, c, g, or t
  misc_feature (962)..(963): n is a, c, g, or t
  misc_feature (973)..(973): n is a, c, g, or t
  misc_feature (1005)..(1006): n is a, c, g, or t
  misc_feature (1010)..(1010): n is a, c, g, or t
  misc_feature (1020)..(1020): n is a, c, g, or t
  misc_feature (1023)..(1023): n is a, c, g, or t
  misc_feature (1028)..(1028): n is a, c, g, or t
  misc_feature (1031)..(1031): n is a, c, g, or t
  misc_feature (1034)..(1034): n is a, c, g, or t
  misc_feature (1044)..(1044): n is a, c, g, or t
  misc_feature (1057)..(1058): n is a, c, g, or t
  misc_feature (1061)..(1061): n is a, c, g, or t
  misc_feature (1087)..(1087): n is a, c, g, or t
  misc_feature (1095)..(1095): n is a, c, g, or t
  misc_feature (1098)..(1098): n is a, c, g, or t
  misc_feature (1116)..(1116): n is a, c, g, or t
  misc_feature (1132)..(1132): n is a, c, g, or t
  misc_feature (1145)..(1145): n is a, c, g, or t
  misc_feature (1153)..(1155): n is a, c, g, or t
  misc_feature (1158)..(1163): n is a, c, g, or t
  misc_feature (1168)..(1169): n is a, c, g, or t
agagaaattactatgagaggatcgcatcaccatcaccatcacggatcctatttaggtgacactatagaatcgtcgacccacgcgtccggccgacgaagagttcagtcccaatgggcctccactaggggaggccataaggagcgccccacagtcatgctgtttccctttaggaatctcggctcaccaacccaggtcatatctaagcctgagagcaaggaagaacatgcgatatacacagcagacctagccatgggcacaagagcagcctccactgggaagtctaagagtccatgccagaccctggggggaagggctctgaaggagaacccagttgacttgcctgccacagagcaaaaggagtgagtggaacagagttgcttcttactaggagcacattctttgcctgccttcccttcatcctatcctctttgcttgctctcacctcaggaattgcttggattgctacatggaccccctgagactatcattattacctcctagggccaggaagccaggtaggtagtctgagtcaggattggatcaacagcctcctctcttggggactctcaagagcctgtgttcatctagaagtagtagtttgattctggtttccctcctacagtgtgtcctccgtctctgtgcagctccgtcattaccataggggacttggttttagactctgatgaggaagaaaatggccagggggaaggaaaggtgagtgggaaggagcagaaagctgggaaaggggatgggtagaacaagactgagaaatccacatgcttcagaattcagagggttcagggaatggtttcggatagtangctctccctgctcccttctctacaggaatctctggaaaactatcagaagacaaagtttgacacctttgatacccactctctgtgaatacctaccccctttctggccacnggtgccatacctgttttnttccttgngactgnnaaaagacagnttctaaaacctttttgaaaaaaactaaaatgnncctntgaactctantcncctgnctnctncagctctgcnagtaatttaatannaantgaaagtggaaattccaggcttggantgccctanctnccctgctaaaaaaattgnaaaccttaaaataaantttggaattgttnaaaaaaannnaannnnnntatann

SEQ ID NO: 333 - DNA, 1135 bp, Homo Sapiens
  misc_feature (2)..(2): n is a, c, g, or t
  misc_feature (789)..(789): n is a, c, g, or t
  misc_feature (873)..(873): n is a, c, g, or t
  misc_feature (881)..(881): n is a, c, g, or t
  misc_feature (902)..(902): n is a, c, g, or t
  misc_feature (918)..(918): n is a, c, g, or t
  misc_feature (951)..(951): n is a, c, g, or t
  misc_feature (956)..(956): n is a, c, g, or t
  misc_feature (987)..(987): n is a, c, g, or t
  misc_feature (991)..(992): n is a, c, g, or t
  misc_feature (994)..(994): n is a, c, g, or t
  misc_feature (1028)..(1029): n is a, c, g, or t
  misc_feature (1032)..(1032): n is a, c, g, or t
  misc_feature (1039)..(1039): n is a, c, g, or t
  misc_feature (1047)..(1047): n is a, c, g, or t
  misc_feature (1055)..(1055): n is a, c, g, or t
  misc_feature (1057)..(1057): n is a, c, g, or t
  misc_feature (1066)..(1066): n is a, c, g, or t
  misc_feature (1068)..(1068): n is a, c, g, or t
  misc_feature (1073)..(1073): n is a, c, g, or t
  misc_feature (1078)..(1080): n is a, c, g, or t
  misc_feature (1082)..(1082): n is a, c, g, or t
  misc_feature (1093)..(1094): n is a, c, g, or t
  misc_feature (1101)..(1101): n is a, c, g, or t
  misc_feature (1103)..(1103): n is a, c, g, or t
  misc_feature (1107)..(1107): n is a, c, g, or t
  misc_feature (1109)..(1109): n is a, c, g, or t
  misc_feature (1122)..(1122): n is a, c, g, or t
  misc_feature (1133)..(1133): n is a, c, g, or t
tnaaagagaaattactatgagaggatcgcatcaccatcaccatcacgggatcctatttaggtgacactatagaatcgtcgacccacgcgtccgcccacgcgtccgctgttttctacgtctacggcagcttcgggatcttctggtacctgttctggctgctcgtctcctacgagtcccccgcgctgcaccccagcatctcggaggaggagcgcaagtacatcgaggacgccatcggagagagcgcgaaactcatgaaccccctcacgaagtttagcactccctggcggcgcttcttcacgtctatgccagtctatgccatcatcgtggccaacttctgccgcagctggacgttctacctgctgctcatctcccagcccgcctacttcgaagaagtgttcggcttcgagatcagcaaggtaggcctggtgtccgcgctgccccacctggtcatgaccatcatcgtgcccatcggcggccagatcgcggacttcctgcggagccgccgcatcatgtccaccaccaacgtgcgcaagttgatgaactgcggaggcttcggcatggaagccacgctgctgttggtggtcggctactcgcactccaagggcgtggccatctccttcctggtcctagccgtgggcttcagcggcttcgccatctctgggttcaacgtgaaccacctggacatagccccgcgctacgccagcatcctcatgggcatctccaacggcgtgggcacactgtcgggcatggtgtgccccatcatcgtggggggccatgactaagcacaanactcgggaggagtggcagtacgtgttcctaattgccttccctggtgcactatggaggtgtcatctttctacggggtctttgctnctggaaanaaaacaacccgtgggccaaancctgaggaaatgaacnaggaaaaatgtggcttccgttggccatgacaanctggntggaatggacaaagcaaaatggaagaatgangctnnancccccgggggaaaccccttgaacccccgccctcnntanggggccnaaaaaaanaaattttnanccccccaangnccccnccccnnntncgggaaaaatnnaacatgngncccncnaaggaaagggaantttccaagaanct

SEQ ID NO: 334 - DNA, 969 bp, Homo Sapiens
  misc_feature (745)..(746): n is a, c, g, or t
  misc_feature (759)..(759): n is a, c, g, or t
  misc_feature (768)..(768): n is a, c, g, or t
  misc_feature (782)..(782): n is a, c, g, or t
  misc_feature (786)..(788): n is a, c, g, or t
  misc_feature (807)..(807): n is a, c, g, or t
  misc_feature (813)..(813): n is a, c, g, or t
  misc_feature (815)..(815): n is a, c, g, or t
  misc_feature (822)..(822): n is a, c, g, or t
  misc_feature (826)..(826): n is a, c, g, or t
  misc_feature (833)..(833): n is a, c, g, or t
  misc_feature (836)..(836): n is a, c, g, or t
  misc_feature (843)..(843): n is a, c, g, or t
  misc_feature (846)..(846): n is a, c, g, or t
  misc_feature (871)..(871): n is a, c, g, or t
  misc_feature (875)..(875): n is a, c, g, or t
  misc_feature (879)..(879): n is a, c, g, or t
  misc_feature (885)..(886): n is a, c, g, or t
  misc_feature (892)..(892): n is a, c, g, or t
  misc_feature (911)..(914): n is a, c, g, or t
  misc_feature (916)..(916): n is a, c, g, or t
  misc_feature (931)..(931): n is a, c, g, or t
  misc_feature (934)..(934): n is a, c, g, or t
  misc_feature (951)..(951): n is a, c, g, or t
  misc_feature (956)..(956): n is a, c, g, or t
  misc_feature (962)..(962): n is a, c, g, or t
  misc_feature (965)..(965): n is a, c, g, or t
aatagagagattactatgagaggatcgcatcaccatcaccatcacgggatcctatttaggtgacactatagaatcgtcgacccacgcgtccgactcagcatgcccaactcccaaccctctgtctcgacacagtccagcccctttctccaaatcttctacgttctatagaaacagcccagcaagggaattgcatcttcctataagggatggtaatactttggaaatgcatggtgacacctgccaacctggcattttcaactatgccacaaggctgggaaggagaagcaagagtcctcaggccatggcatcacatggttctagaccagggagtcgcctaaagcagccgattgggcagattccactggaatcttctcctccagtcggactttctattgaagaagtggagaggctcaacacacctcgccctagaaacccaagtatctgcagtgcagaccatgggaggtcttcttcagaggaggactgcagaaggccactgtctagaacaaggaatccagcggatggcattccagctccagaatcctcttctgatagtgactcccatgaatctttcacttgctcagaaatggaatatgacagggagaagccaatggtatatacttccaggatgcccaaaattatctcaagtcaaatgaatctgatgcagatgatgaaagataattatggagccagactgaagccttcgaaggtaccacgggtcgcagggcccgagggaaggacctgtggnncaccccaaggcancagcaccanggcaactgcttganaacnnnactggcccatgaaagctangggcancnaagcaanggancttttcnacntgggganaanctttttgaactgggggcccctggcntttngccnattaanntaaaanggtttttaaaagaatttgnnnncnccttcccagaaaaanccngtcagccaaatggaaanaaggngaaaanctngggg

SEQ ID NO: 335 - DNA, 906 bp, Homo Sapiens
tgagaggtcgcatcaccatcaccatcacggatcctatttaggtgacactatagaatcgtcgacccacgcgtccgcggacgcgtgggacacagtcctcatgggctccctccagcactgctgttgcctgctgcctaagatgggtgacacttgggcccagcttccctggcccgggccaccccacccagcaatgctgctgatctccctcctcttggcagccgggttgatgcactcggatgccggcaccagctgccccgtcctttgcacatgccgtaaccaggtggtggattgtagcagccagcggctattctccgtgcccccagacctgccaatggacacccgaaacctcagcctggcccacaaccgcatcacagcagtgccgcctggctacctcacatgctacatggagctccaggtgctggatttgcacaacaactccttaatggagctgccccggggcctcttcctccatgccaagcgcttggcacacttggacctgagctacaacaatttcagccatgtgccagccgacatgttccaggaggcccatgggctagtccacatcgacctgagccacaacccctggctgcggagggtgcatccccaggcctttcagggcctcatgcagctccgagacctggacctcagttatgggggcctggccttcctcagcctggaggctcttgagggcctaccggggctggtgaccctgcagatcggtggcaatccctgggtgtgtggctgcaccatggaacccctgctgaagtggctgcgaaaccggatccagcgctgtacagcaggtaatagaggggcagaacggggcagtcaacagggagggcttgcctcaatgggaagcaaaggctccaaagaaagcgggggaacttagagccagaaagcacctactgcgtt

SEQ ID NO: 336 - DNA, 1288 bp, Homo Sapiens
  misc_feature (5)..(5): n is a, c, g, or t
  misc_feature (204)..(204): n is a, c, g, or t
  misc_feature (808)..(808): n is a, c, g, or t
  misc_feature (903)..(903): n is a, c, g, or t
  misc_feature (909)..(909): n is a, c, g, or t
  misc_feature (933)..(933): n is a, c, g, or t
  misc_feature (935)..(935): n is a, c, g, or t
  misc_feature (938)..(938): n is a, c, g, or t
  misc_feature (941)..(941): n is a, c, g, or t
  misc_feature (971)..(971): n is a, c, g, or t
  misc_feature (980)..(980): n is a, c, g, or t
  misc_feature (984)..(984): n is a, c, g, or t
  misc_feature (986)..(986): n is a, c, g, or t
  misc_feature (991)..(991): n is a, c, g, or t
  misc_feature (1014)..(1014): n is a, c, g, or t
  misc_feature (1017)..(1017): n is a, c, g, or t
  misc_feature (1024)..(1024): n is a, c, g, or t
  misc_feature (1044)..(1044): n is a, c, g, or t
  misc_feature (1047)..(1048): n is a, c, g, or t
  misc_feature (1054)..(1054): n is a, c, g, or t
  misc_feature (1065)..(1065): n is a, c, g, or t
  misc_feature (1075)..(1075): n is a, c, g, or t
  misc_feature (1078)..(1078): n is a, c, g, or t
  misc_feature (1097)..(1097): n is a, c, g, or t
  misc_feature (1110)..(1110): n is a, c, g, or t
  misc_feature (1113)..(1113): n is a, c, g, or t
  misc_feature (1123)..(1123): n is a, c, g, or t
  misc_feature (1126)..(1126): n is a, c, g, or t
  misc_feature (1129)..(1129): n is a, c, g, or t
  misc_feature (1138)..(1138): n is a, c, g, or t
  misc_feature (1143)..(1143): n is a, c, g, or t
  misc_feature (1145)..(1145): n is a, c, g, or t
  misc_feature (1156)..(1156): n is a, c, g, or t
  misc_feature (1158)..(1158): n is a, c, g, or t
  misc_feature (1167)..(1167): n is a, c, g, or t
  misc_feature (1173)..(1173): n is a, c, g, or t
  misc_feature (1177)..(1178): n is a, c, g, or t
  misc_feature (1180)..(1180): n is a, c, g, or t
  misc_feature (1200)..(1200): n is a, c, g, or t
  misc_feature (1204)..(1204): n is a, c, g, or t
  misc_feature (1209)..(1209): n is a, c, g, or t
  misc_feature (1212)..(1212): n is a, c, g, or t
  misc_feature (1234)..(1234): n is a, c, g, or t
  misc_feature (1239)..(1240): n is a, c, g, or t
  misc_feature (1244)..(1246): n is a, c, g, or t
  misc_feature (1251)..(1251): n is a, c, g, or t
  misc_feature (1253)..(1253): n is a, c, g, or t
  misc_feature (1286)..(1286): n is a, c, g, or t
  misc_feature (1288)..(1288): n is a, c, g, or t
tagangaaattaactatgagaggatcgcatcaccatcaccatcacggatcctatttaggtgacactatagaatcgtcgacccacgcgtccggacgcggaggatgctggcgccccgctggtgtacgccctgctgctgcagcgctgtcgccagggccactgcgaggagttctgtgtctacaagggcagcctctccggctacggagncgtgctgcccccgggtttcaggccacacttcgaggtgggcctggccgtggtggtgcaggaccagctgggagccgctgtggtcgccctcaacaggtctctggccatcaccctcccagagcccaacggcagcgcaatggggctcacagtctggctgcacgggctcaccgctagtgtgctcccggggctgctgcggcaggccgatccccagcacgtcatcgagtactcgctggccctggtcactgtgctgaacgagtacgagcgggccctggacgtggcggcagagcccaagcacgagcggcagcgccgagcccagatacgcaagaacatcacggagactctggtgtccctgagggtccacactgtggatgacatccagcagatcgctgctgcgctggcccagtgcatggggcccagcagggagctcgtatgccgctcgtgcctgaagcagacgctgcacaagctggaggccatgatgcgcatcctgcaggcagagaccaccgcgggcaccgtgacgcccaccgccatcggagacagcatcctcaacatcacaggagacctcatccacctggccagctcagacgtgcgggcaccacagcgctcaganctgggagccgagtcaccatcgcggatggtggcgtcccaggcctacaacctgacctctgccctcacgcccatcgtcacgcgctcccgcgtgctaangaggancccctgaacgctggcgggcttttnancanggnccccggccaacctcagtgacgtggtgcacntcatctttntggngnactcnaatcccttttcctttggctaaancanaaataanaccgtttccaccaaggtggnctnnaatggngtttcaaaaanaaggccggcnccnaaaatccccatcaaggggntggccttaaaaanggncctcaccgtnaangcnccttacttnttttnanaaacccaaccntnccttggaantttaanttgnntncgaaacccggcccaataaancaanttttntgnttaaaaaaaaatcccccaaaantcctnnaggnnncaaanangggcctaatttttttttttccgggaaaaaaaancn

SEQ ID NO: 337 - DNA, 1130 bp, Homo Sapiens
  misc_feature (924)..(924): n is a, c, g, or t
  misc_feature (950)..(950): n is a, c, g, or t
  misc_feature (954)..(954): n is a, c, g, or t
  misc_feature (977)..(977): n is a, c, g, or t
  misc_feature (986)..(986): n is a, c, g, or t
  misc_feature (1013)..(1013): n is a, c, g, or t
  misc_feature (1015)..(1015): n is a, c, g, or t
  misc_feature (1033)..(1033): n is a, c, g, or t
  misc_feature (1038)..(1038): n is a, c, g, or t
  misc_feature (1040)..(1040): n is a, c, g, or t
  misc_feature (1043)..(1043): n is a, c, g, or t
  misc_feature (1045)..(1046): n is a, c, g, or t
  misc_feature (1048)..(1048): n is a, c, g, or t
  misc_feature (1051)..(1051): n is a, c, g, or t
  misc_feature (1055)..(1055): n is a, c, g, or t
  misc_feature (1057)..(1057): n is a, c, g, or t
  misc_feature (1060)..(1060): n is a, c, g, or t
  misc_feature (1067)..(1067): n is a, c, g, or t
  misc_feature (1069)..(1069): n is a, c, g, or t
  misc_feature (1072)..(1072): n is a, c, g, or t
  misc_feature (1077)..(1077): n is a, c, g, or t
  misc_feature (1086)..(1086): n is a, c, g, or t
  misc_feature (1089)..(1089): n is a, c, g, or t
  misc_feature (1095)..(1095): n is a, c, g, or t
  misc_feature (1099)..(1099): n is a, c, g, or t
  misc_feature (1109)..(1109): n is a, c, g, or t
tagagagattactatgagaggatcgcatcaccatcaccatcacggatcctatttaggtgacactatagaatcgtcgacccacgcgtccgagaaacctgcagccgcagcagctcctggcactgcggagaagttgagccccaaggcggccacgcttgccgagcgcagcgccggcctggccttcagcttgtaccaggccatggccaaggaccaggcagtggagaacatcctggtgtcacccgtggtggtggcctcgtcgctggggctcgtgtcgctgggcggcaaggcgaccacggcgtcgcaggccaaggcagtgctgagcgccgagcagctgcgcgacgaggaggtgcacgccggcctgggcgagctgctgcgctcactcagcaactccacggcgcgcaacgtgacctggaagctgggcagccgactgtacggacccagctcagtgagcttcgctgatgacttcgtgcgcagcagcaagcagcactacaactgcgagcactccaagatcaacttccgcgacaagcgcagcgcgctgcagtccatcaacgagtgggccgcgcagaccaccgacggcaagctgcccgaggtcaccaaggacgtggagcgcacggacggcgccctgttagtcaacgccatgttcttcaagccacactgggatgagaaattccaccacaagatggtggacaaccgtggcttcatggtgactcggtcctataccgtgggtgtcatgatgatgcaccggacaggcctctacaactactacgacgacgagaaggaaaagctgcaaatcgtggagatgcccctggcccacaagctctccagcctcatcatcctcatgccccatcacgtggagcctctcgagcgccttgaaaagctgctaaccaaagaagcaacctgaagatctggatggggaaaatgcaaaanaaggctgttgccatctccttgccaanggtntggtgggaggtgaaccattgacntgcaaaaancacctggttgggctgggccctgaactnangccattgaaaaaaacaanggccnanttntnncncantttnanganaaaaaananctntaacntggccaagngtnttcccncccncccccttttnatttgaaacaaaatggcaacc

SEQ ID NO: 338 - DNA, 1085 bp, Homo Sapiens
  misc_feature (344)..(344): n is a, c, g, or t
  misc_feature (474)..(474): n is a, c, g, or t
  misc_feature (525)..(525): n is a, c, g, or t
  misc_feature (566)..(566): n is a, c, g, or t
  misc_feature (642)..(642): n is a, c, g, or t
  misc_feature (750)..(750): n is a, c, g, or t
  misc_feature (805)..(805): n is a, c, g, or t
  misc_feature (814)..(814): n is a, c, g, or t
  misc_feature (861)..(861): n is a, c, g, or t
  misc_feature (893)..(893): n is a, c, g, or t
  misc_feature (896)..(896): n is a, c, g, or t
  misc_feature (913)..(913): n is a, c, g, or t
  misc_feature (924)..(924): n is a, c, g, or t
  misc_feature (927)..(928): n is a, c, g, or t
  misc_feature (938)..(938): n is a, c, g, or t
  misc_feature (952)..(952): n is a, c, g, or t
  misc_feature (954)..(954): n is a, c, g, or t
  misc_feature (961)..(961): n is a, c, g, or t
  misc_feature (963)..(963): n is a, c, g, or t
  misc_feature (982)..(982): n is a, c, g, or t
  misc_feature (998)..(998): n is a, c, g, or t
  misc_feature (1007)..(1007): n is a, c, g, or t
  misc_feature (1016)..(1016): n is a, c, g, or t
  misc_feature (1019)..(1019): n is a, c, g, or t
  misc_feature (1027)..(1030): n is a, c, g, or t
  misc_feature (1032)..(1032): n is a, c, g, or t
  misc_feature (1042)..(1042): n is a, c, g, or t
  misc_feature (1051)..(1051): n is a, c, g, or t
  misc_feature (1060)..(1060): n is a, c, g, or t
  misc_feature (1074)..(1074): n is a, c, g, or t
  misc_feature (1076)..(1076): n is a, c, g, or t
  misc_feature (1078)..(1080): n is a, c, g, or t
tagagaaattactatgagaggatcgcatcaccatcaccatcacggatcctatttaggtgacactatagaatcgtcgacccacgcgttccgcccacgcgtccgcccacgcgttccgcgccggcggttgcctcgcggggttgcggcgagcccggcccgcgaacgtcacgtccctgcgcgctccctgcactctcccgagctgcgctaggcgggcgccacggctgcccggcgaaggaaaccgaaaccgagtccgggcccgtccctccgcggccccatccgcccggtgcacccggggtcgcgctcgccaggccgcggagcccagagctgcgcgcacgaaccgtgcgccnggagggcgtgggcgtggcgccgaagggtcccgggtcttcgacgcctctgcggcggctcctccctccttgcagttggatccctggcgggtgcggcccggcccggcccgtgagcggcgcacagaatgggccnatgctgcttctacacggcggggacgttgtccctgctcctgctggtgaccancgtcacgctgctggtggcccgggtcttccagaaggctgtanaccagagtatcgagaagaaaattgtgttaaggaatggtactgaggcatttgactcctgggagaagccccctctgcntgtgtatactcagttctatttcttcaatgtcaccaatccagaggagatcctcagaggggagacccctcgggtggaaaaaatggggccatacacctacagggaactcanaaacaaagcaaatattcaatttggagataatggaacaacaatatctgctgttaanaacaaaggnctatgtttttgaacgaaaaccaatctgtttggaaaaccctaaaattnaactttaattaaaaaatttaaataattcctgnaantgacttgtcaaaaaaantgggtcccaangtnnactttcctcnagggaaaatcatcnanggcccantntttaaaaagccttattaancaaaaaactttttttntgaaatcanaacaagttnaanaaaatttnnnntnttgggggctnaaaaaaaanaaaaaattnttgtcccctttaancnannnttttt

SEQ ID NO: 339 - DNA, 944 bp, Homo Sapiens
atgagaggtcgcatcaccatcaccatcacggatcctatttaggtgacactatagaatcgtcgacccacgcgtccggcttcaaccacttcagcttgaccctcaacaccaaccatgggcatatcctggtggattactccaagaacctggtgacggaggacgtgatgcggatgctggtggacttggccaagtccaggggcgtggaggccgcccgggagcggatgttcaatggtgagaagatcaactacaccgagggtcgagccgtgctgcacgtggctctgcggaaccggtcaaacacacccatcctggtagacggcaaggatgtgatgccagaggtcaacaaggttctggacaagatgaagtctttctgccagcgtgtccggagcggtgactggaaggggtacacaggcaagaccatcacggacgtcatcaacattggcattggcggctccgacctgggacccctcatggtgactgaagcccttaagccatactcttcaggaggtccccgcgtctggtatgtctccaacattgatggaactcacattgccaaaaccctggcccagctgaaccccgagtcctccctgttcatcattgcctccaagacctttactacccaggagaccatcacgaatgcagagacggcgaaggagtggtttctccaggcggccaaggatccttctgcagtggcgaagcactttgttgccctgtctactaacacaaccaaagtgaaggagtttggaattgaccctcaaaacatgttcgagttctgggattgggtgggaggacgctactcgctgtggtcggccatcggactctccattgccctgcacgtgggttttgacaacttcgagcagctgctctcgggggctcactggatggaccagcacttccgcacgacgcccctggagaagaacgcccccgtcttgctggccctgctgggtatc

SEQ ID NO: 340 - DNA, 998 bp, Homo Sapiens
  misc_feature (755)..(755): n is a, c, g, or t
  misc_feature (761)..(766): n is a, c, g, or t
  misc_feature (768)..(786): n is a, c, g, or t
  misc_feature (819)..(819): n is a, c, g, or t
  misc_feature (855)..(855): n is a, c, g, or t
  misc_feature (873)..(873): n is a, c, g, or t
  misc_feature (887)..(887): n is a, c, g, or t
  misc_feature (915)..(915): n is a, c, g, or t
  misc_feature (928)..(928): n is a, c, g, or t
  misc_feature (934)..(934): n is a, c, g, or t
  misc_feature (967)..(967): n is a, c, g, or t
agagagattactatgagaggatcgcatcaccatcaccatcacggatcctatttaggtgacactatagaatcgtcgacccacgcgtccgacctaggccgcgggacccggacggaggtagaggccagggcagcgcgtccgggagcggagtccgcgcccgccgccgccatgccggacagctgggacaaggatgtgtaccctgagcccccgcgccgcacgccggtgcagcccaatcccatcgtctacatgatgaaagcgttcgacctcatcgtggaccgacccgtgaccctcgtgagagaatttatagagcggcagcacgcaaagaacaggtattactactaccaccggcagtaccgccgcgtgccagacatcactgagtgcaaggaggaggacatcatgtgcatgtatgaagccgaaatgcagtggaagagggactacaaagtcgaccaagaaattatcaacattatgcaggatcggctcaaagcctgtcagcagagggaaggacagaactaccagcagaactgtatcaaggaagtggagcagttcacccaggtggccaaggcctaccaggaccgctatcaggacctgggggcctacagttctgccaggaagtgcctggccaaacagaggcagaggatgctgcaagagagaaaagctgcaaaagaggccgccgctgccacctcctgaggcagctgtgggtgcccctgctgtgtggctctgtatgactgttgctgaaatataaagccctgcaacctganaaaaannnnnnannnnnnnnnnnnnnnnnnnaaagggcggccgctccctatagtgagtcgtatnaagcttaattagctgagcttggactcctgttgatanatccagtaatgacctcanaactcccttctggnatttgttcaaaacgctcggttgccgccngggcgtttttttntttggngaaaatcccaagcttagcttgggcgaaattttncggagcttaagggaagcttaaatgggaaaaa

SEQ ID NO: 341 - DNA, 1121 bp, Homo Sapiens
  misc_feature (860)..(860): n is a, c, g, or t
  misc_feature (884)..(884): n is a, c, g, or t
  misc_feature (897)..(897): n is a, c, g, or t
  misc_feature (934)..(934): n is a, c, g, or t
  misc_feature (963)..(963): n is a, c, g, or t
  misc_feature (982)..(982): n is a, c, g, or t
  misc_feature (995)..(995): n is a, c, g, or t
  misc_feature (1002)..(1002): n is a, c, g, or t
  misc_feature (1012)..(1012): n is a, c, g, or t
  misc_feature (1015)..(1015): n is a, c, g, or t
  misc_feature (1032)..(1032): n is a, c, g, or t
  misc_feature (1036)..(1036): n is a, c, g, or t
  misc_feature (1040)..(1040): n is a, c, g, or t
  misc_feature (1053)..(1053): n is a, c, g, or t
  misc_feature (1055)..(1055): n is a, c, g, or t
  misc_feature (1060)..(1060): n is a, c, g, or t
  misc_feature (1065)..(1066): n is a, c, g, or t
  misc_feature (1074)..(1074): n is a, c, g, or t
  misc_feature (1084)..(1084): n is a, c, g, or t
  misc_feature (1086)..(1086): n is a, c, g, or t
  misc_feature (1090)..(1090): n is a, c, g, or t
  misc_feature (1093)..(1093): n is a, c, g, or t
  misc_feature (1099)..(1099): n is a, c, g, or t
  misc_feature (1107)..(1107): n is a, c, g, or t
  misc_feature (1112)..(1112): n is a, c, g, or t
  misc_feature (1114)..(1114): n is a, c, g, or t
  misc_feature (1116)..(1118): n is a, c, g, or t
tagagaaattactatgagaggatcgcatcaccatcaccatcacggatcctatttaggtgacactatagaatcgtcgacccacgcgtccgtgattatctaccgggacctcatcagccacgatgagatgttctccgacatctacaagatccgggagatcgcggacgggttgtgcctggaggtggaggggaagatggtcagtaggacagaaggtaacattgatgactcgctcattggtggaaatgcctccgctgaaggccccgagggcgaaggtaccgaaagcacagtaatcactggtgtcgatattgtcatgaaccatcacctgcaggaaacaagtttcacaaaagaagcctacaagaagtacatcaaagattacatgaaatcaatcaaagggaaacttgaagaacagagaccagaaagagtaaaaccttttatgacaggggctgcagaacaaatcaagcacatccttgctaatttcaaaaactaccagttctttattggtgaaaacatgaatccagatggcatggttgctctattggactaccgtgaggatggtgtgaccccatatatgattttctttaaggatggtttagaaatggaaaaatgttaacaaatgtggcaattattttggatctatcacctgtcatcataactggcttctgcttgtcatccacacaacaccaggacttaagacaaatgggactgatgtcatcttgagctcttcatttattttgactgtgatttatttggagtggaggcattgtttttaagaaaaacatgtcatgtaggttgtctaaaaataaaatgcatttaaactcatttgagagaatgccttttagtttaatgcatatttaaactaaatngatcctgtagtgttcctggagaanctagagcctgatngtaggctactactcatcaattaacttctacagtgganactacttctgggactggaatataaaaaanaatcaaaggttctgatttngagttgcaataangggaaanaccatgctcntancagtgccaacatctgangtgngganccttacccatttncntcccntacannggaagtanttactggaananattnccngaaaanaaaaaaanactcntncnnngga

SEQ ID NO: 342 - DNA, 1161 bp, Homo Sapiens
  misc_feature (920)..(920): n is a, c, g, or t
  misc_feature (926)..(926): n is a, c, g, or t
  misc_feature (935)..(935): n is a, c, g, or t
  misc_feature (971)..(971): n is a, c, g, or t
  misc_feature (973)..(973): n is a, c, g, or t
  misc_feature (1034)..(1034): n is a, c, g, or t
  misc_feature (1038)..(1038): n is a, c, g, or t
  misc_feature (1042)..(1042): n is a, c, g, or t
  misc_feature (1056)..(1056): n is a, c, g, or t
  misc_feature (1065)..(1065): n is a, c, g, or t
  misc_feature (1068)..(1068): n is a, c, g, or t
  misc_feature (1095)..(1095): n is a, c, g, or t
  misc_feature (1106)..(1106): n is a, c, g, or t
  misc_feature (1110)..(1110): n is a, c, g, or t
  misc_feature (1128)..(1128): n is a, c, g, or t
  misc_feature (1131)..(1131): n is a, c, g, or t
  misc_feature (1134)..(1134): n is a, c, g, or t
  misc_feature (1139)..(1139): n is a, c, g, or t
  misc_feature (1141)..(1141): n is a, c, g, or t
  misc_feature (1147)..(1147): n is a, c, g, or t
  misc_feature (1149)..(1150): n is a, c, g, or t
  misc_feature (1152)..(1153): n is a, c, g, or t
  misc_feature (1155)..(1155): n is a, c, g, or t
  misc_feature (1161)..(1161): n is a, c, g, or t
tagagaaattactatgagaggatcgcatcaccatcaccatcacggatcctatttaggtgacactatagaatcgtcgacccacgcgtccggcggcgaaggaggtggtggctgcgttgggctccgggaagccgttcgggctggggctgtcggccgcggggcggaggcactcgcgcgggggatggcccactgcgtgaccttggttcagctgtccatttcctgtgaccatctcattgacaaggacatcggctccaagtctgacccactctgcgtccttttacaggatgtgggagggggcagctgggctgagcttggccggactgaacgggtgcggaactgctcaagccctgagttctccaagactctacagcttgagtaccgctttgagacagtccagaagctacgctttggaatctatgacatagacaacaagacgccagagctgagggatgatgacttcctagggggtgctgagtgttccctaggacagattgtgtccagccaggtactgactctccccttgatgctgaagcctggaaaacctgctgggcgggggaccatcacggtctcagctcaggaattaaaggacaatcgtgtagtaaccatggaggtagaggccagaaacctagataagaaggacttcctgggaaaatcagatccatttctggagttcttccgccagggtgatgggaaatggcacctggtgtacagatctgaggtcatcaagaacaacctgaaccctacatggaagcgtttctcagtccccgttcagcatttctgtggtgggaaccccagcacacccatccaggtgcaatgctccgattatgacagtgacgggtcacatgatctcatcggtaccttccacaccagcttggcccagctgcaggcagtcccggctgaatttgaatgcatccacccctganaagcancaaaaaaanaaaagctacaagaactctggaactatccgtgtcaanantttgtcgggtaaaaacaaaatactcctttctggaatatgtgatgggaggctgtcaaatcanttcnctgngggcgtggacttcntggctccanggnaaacccctcctcactgaatccctaaantaactgaatcnaaangggtcaatgaaaactganggnccntgggnangggggncnncnngntttaan

SEQ ID NO: 343 - DNA, 1179 bp, Homo Sapiens
  misc_feature (930)..(930): n is a, c, g, or t
  misc_feature (946)..(946): n is a, c, g, or t
  misc_feature (953)..(953): n is a, c, g, or t
  misc_feature (957)..(957): n is a, c, g, or t
  misc_feature (962)..(962): n is a, c, g, or t
  misc_feature (969)..(969): n is a, c, g, or t
  misc_feature (977)..(977): n is a, c, g, or t
  misc_feature (991)..(991): n is a, c, g, or t
  misc_feature (1002)..(1002): n is a, c, g, or t
  misc_feature (1015)..(1015): n is a, c, g, or t
  misc_feature (1058)..(1058): n is a, c, g, or t
  misc_feature (1064)..(1064): n is a, c, g, or t
  misc_feature (1074)..(1074): n is a, c, g, or t
  misc_feature (1080)..(1080): n is a, c, g, or t
  misc_feature (1084)..(1084): n is a, c, g, or t
  misc_feature (1089)..(1089): n is a, c, g, or t
  misc_feature (1100)..(1100): n is a, c, g, or t
  misc_feature (1112)..(1112): n is a, c, g, or t
  misc_feature (1127)..(1127): n is a, c, g, or t
  misc_feature (1144)..(1144): n is a, c, g, or t
  misc_feature (1151)..(1151): n is a, c, g, or t
  misc_feature (1155)..(1155): n is a, c, g, or t
  misc_feature (1162)..(1162): n is a, c, g, or t
  misc_feature (1169)..(1169): n is a, c, g, or t
  misc_feature (1172)..(1172): n is a, c, g, or t
  misc_feature (1174)..(1174): n is a, c, g, or t
  misc_feature (1179)..(1179): n is a, c, g, or t
agagagaattactatgagaggatcgcatcaccatcaccatcacggatcctatttaggtgacactatagaatcgtcgacccacgcgtccgagcggcggacccggctgggcagttccttccccagaaggagagattcctctgccatggagtcctacgatgtgatcgccaaccagcctgtcgtgatcgacaacggatccggtgtgattaaagctggttttgctggtgatcagatccccaaatactgctttccaaactatgtgggccgacccaagcacgttcgtgtcatggcaggagcccttgaaggcgacatcttcattggccccaaagctgaggagcaccgagggctgctttcaatccgctatcccatggagcatggcatcgtcaaggattggaacgacatggaacgcatttggcaatatgtctattctaaggaccagctgcagactttctcagaggagcatcctgtgctcctgactgaggcgcctttaaacccacgaaaaaaccgggaacgagctgccgaagttttcttcgagaccttcaatgtgcccgctcttttcatctccatgcaagctgtactcagcctttacgctacaggcaggaccacaggggtggtgctggattctggggatggagtcacccatgctgtgcccatctatgagggctttgccatgccccactccatcatgcgcatcgacatcgcgggccgggacgtctctcgcttcctgcgcctctacctgcgtaaggagggctacgacttccactcatcctctgagtttgagattgtcaaggccataaaagaaagagcctgttacctatccataaacccccaaaaggatgagacgctagagacagagaaagctcagtactacctgcctgatggcagcaccattgagattggtccttcccgattccgggcccctgagttgctctncaggccaaatttgatnggaaagnaaantgaangcatccncaaggtcntggtgttccccatncaaaatcaaanatggacctgcggngcacgctttctctaaattgtcctctcaggaggctctacctgtncaaagntttggtgaanggctcntgantgaantgaaaaactanctccaaaaattnaaaatcaggaattcngccccccggaaaaatgnattcccngggnatggggntccctcntgncncctgn

SEQ ID NO: 344 - DNA, 1179 bp, Homo Sapiens
  misc_feature (813)..(813): n is a, c, g, or t
  misc_feature (823)..(823): n is a, c, g, or t
  misc_feature (847)..(847): n is a, c, g, or t
  misc_feature (855)..(855): n is a, c, g, or t
  misc_feature (873)..(873): n is a, c, g, or t
  misc_feature (880)..(880): n is a, c, g, or t
  misc_feature (885)..(885): n is a, c, g, or t
  misc_feature (905)..(905): n is a, c, g, or t
  misc_feature (928)..(928): n is a, c, g, or t
  misc_feature (939)..(940): n is a, c, g, or t
  misc_feature (971)..(972): n is a, c, g, or t
  misc_feature (987)..(987): n is a, c, g, or t
  misc_feature (994)..(994): n is a, c, g, or t
  misc_feature (1006)..(1007): n is a, c, g, or t
  misc_feature (1020)..(1020): n is a, c, g, or t
  misc_feature (1041)..(1041): n is a, c, g, or t
  misc_feature (1047)..(1048): n is a, c, g, or t
  misc_feature (1056)..(1056): n is a, c, g, or t
  misc_feature (1083)..(1084): n is a, c, g, or t
  misc_feature (1088)..(1088): n is a, c, g, or t
  misc_feature (1101)..(1101): n is a, c, g, or t
  misc_feature (1104)..(1104): n is a, c, g, or t
  misc_feature (1112)..(1112): n is a, c, g, or t
  misc_feature (1118)..(1118): n is a, c, g, or t
  misc_feature (1121)..(1121): n is a, c, g, or t
  misc_feature (1139)..(1140): n is a, c, g, or t
  misc_feature (1150)..(1150): n is a, c, g, or t
  misc_feature (1159)..(1159): n is a, c, g, or t
  misc_feature (1172)..(1173): n is a, c, g, or t
  misc_feature (1176)..(1176): n is a, c, g, or t
  misc_feature (1178)..(1178): n is a, c, g, or t
aatagagaaattactatgagaggatcgcatcaccatcaccatcacggatcctatttaggtgacactatagaatcgtcgacccacgcgtccgggaagtcagaggggcatggcgaggagtccagctctgaggactctgacattgatggcgaggcggaggacggggagcagggccccatctggacgttcccccctaccatccggccgagtccacacagcaagcttcacaaggggacggccctgcacagttcacagaagcctgcggagcccgtcaagaggcagccgaggtcccagtgcctgtccacgctggtccggcccgtcttcggagagctcaaagagaagcacaagcagagcggcgggagcgtgggtgcgctggaggagctggagaacgccttcagcctggccgaggagtcctgccccggcatctcagacaagctgatggtgcacctggtggagcgagtgcagaggttttcacacaacagaaaccacctgacatccacccgctgaagcgcactgctgttcagataggggacggaaggtcgtttgtttttgttctgagctccataagaactgtgctgacttggaaggtgccctgtgctatgtcgtgcctgcagggacacgtcggatcccgtgggcctcacatgccaggtcaccaggtcaccgtctccttccacccctgcagtgtgctgttgtgcacgtcagggacgctgttctctatgcccactgccctcctccctctcctggcccagcagtattgctcacgggggctccagccgccggcgtggccctcatgagctacgcctgggtcttctgcanactcatgcancccctatggccgctcaaaaccaangcgcaaancaactatcagggcagctnttgcctncctcntcccatgaaggtgggggaanaggcaacaggggccaaccccccnaaagaattgtnntggcccgcttgttccttcccggggcccatgnntggccataaaatttncccttgngggtgtttgganncagggtacttggnttttgcccaaaaaatactttngttcannccaaaatntttttttttttttaaaaaaattaaatnntttnttttccttaaaanttntgaaggtnaaatgnttnatttttttaaaaaaattnnaaagcccctngcccctttnaaaaaaaacctgnnttngna

SEQ ID NO: 345 - DNA, 906 bp, Homo Sapiens
  misc_feature (878)..(880): n is a, c, g, or t
  misc_feature (885)..(885): n is a, c, g, or t
  misc_feature (887)..(890): n is a, c, g, or t
  misc_feature (892)..(906): n is a, c, g, or t
tagagaaattactatgagaggatcgcatcaccatcaccatcacggatcctatttaggtgacactatagaatcgtcgacccacgcgtccgggaacaaagacattgcttttctagaagcccagatctatgaatatgtagagattctcggggaacagcgacatctcactcatgaaaatgtacagcgcaagcaagccaggacaggagaagagcgagaagaagaggaagaagagcagatcagtgagagtgagagtgaagatgaagagaacgagatcatttacaaccccaaaaacctgccacttggctgggatggcaaacctattccctactggctgtataagcttcatggcctaaatatcaactacaactgtgagatttgtggaaactacacctaccgagggcccaaagccttccagcgacactttgctgaatggcgtcatgctcatggcatgaggtgtttgggcatcccaaacactgctcactttgctaatgtgacacagattgaagatgctgtctccttgtgggccaaactgaaattgcagaaggcttcagaacgatggcagcctgacactgaggaagaatatgaagactcaagtgggaatgttgtgaataagaagacatacgaggatctgaaaagacaaggactgctctagtgttgagggatgtagctcagcttttgggctagcccaggcttccctaagatctgctttttctatttctcccaaccaaatcctcttaaagaccctttgctatgtagtctcatggtctagcatgcatcttgtagaaacaaggcatgctggcagattgcagggttgagatgtgttttatctgttttatattttaaaagattctgccagaaaataaaaccagaccttgttcttnnnaaaanannnnannnnnnnnnnnnnnn

SEQ ID NO: 346 - DNA, 1128 bp, Homo Sapiens
  misc_feature (801)..(801): n is a, c, g, or t
  misc_feature (837)..(837): n is a, c, g, or t
  misc_feature (847)..(847): n is a, c, g, or t
  misc_feature (872)..(872): n is a, c, g, or t
  misc_feature (925)..(925): n is a, c, g, or t
  misc_feature (943)..(943): n is a, c, g, or t
  misc_feature (948)..(950): n is a, c, g, or t
  misc_feature (1000)..(1000): n is a, c, g, or t
  misc_feature (1010)..(1010): n is a, c, g, or t
  misc_feature (1028)..(1028): n is a, c, g, or t
  misc_feature (1033)..(1033): n is a, c, g, or t
  misc_feature (1039)..(1039): n is a, c, g, or t
  misc_feature (1056)..(1056): n is a, c, g, or t
  misc_feature (1064)..(1064): n is a, c, g, or t
  misc_feature (1075)..(1075): n is a, c, g, or t
  misc_feature (1083)..(1083): n is a, c, g, or t
  misc_feature (1087)..(1088): n is a, c, g, or t
  misc_feature (1090)..(1090): n is a, c, g, or t
  misc_feature (1092)..(1092): n is a, c, g, or t
  misc_feature (1108)..(1108): n is a, c, g, or t
  misc_feature (1117)..(1117): n is a, c, g, or t
  misc_feature (1119)..(1120): n is a, c, g, or t
  misc_feature (1122)..(1122): n is a, c, g, or t
  misc_feature (1125)..(1125): n is a, c, g, or t
  misc_feature (1128)..(1128): n is a, c, g, or t
attagagaaattactatgagaggatcgcatcaccatcaccatcacggatcctatttaggtgacactatagaatcgtcgacccacgcgtccgcccacgcgtccgcagatgtccctttctgtggcagccagagcgaaacctccaagcccagcccagaagctgtggctaccctggcatctctacagctgcctgcaggccgcaccatgagcccccaggaagtagaagggttgatgaagcagacggtgcgtcaggtgcaggagacgctgaacttagagccagatgtcgctcagcaccttttggctcattcccactggggcgctgaacagctgctgcagagctacagtgaggaccctgagccactgctgctggcagctgggctgtgcgtacaccaggctcaggctgtacccgtacggcctgaccactgccccgtctgtgtgagccccctggggtgtgacgacgacctgccctctctctgctgcatgcactattgctgtaagtcttgctggaatgagtacctgacaactcggatcgagcagaaccttgttttgaattgcacctgccccattgccgactgccccgcccagcccaccggagccttcattcgtgccatcgtctcctcgccagaggtcatctccaagtatgagaaggcgctcctgcgtggctatgtggagagctgctccaacctgacctggtgcaccaacccccagggctgcgaccgcatcctgtgccgccagggcctgggctgtgggaccacctgctccaagtgtggctgggcctcttgcttcaactgtagcttccctgangcacactaccctgctagctgtggccatatgtctcantgggtcgacnacggtggctactatgacggcatgancgtggaggcgcaaaacaagcacctggccaagctcatctccaagcgctgtccanctgtcaggctccatcganaaaannnagggggcctgcacatgacctgtgccaaatgtaacatggattctgctggcnctgcctcaantcctggaagccaaatcanaaaantattanaactgctctgccatggnaaacaagnaactccccagnaaaaacgntttnngnantaaatgaaaagggcantttccttcncnngnccnggn

SEQ ID NO: 347 - DNA, 1257 bp, Homo Sapiens
  misc_feature (853)..(853): n is a, c, g, or t
  misc_feature (869)..(869): n is a, c, g, or t
  misc_feature (989)..(989): n is a, c, g, or t
  misc_feature (997)..(997): n is a, c, g, or t
  misc_feature (1010)..(1010): n is a, c, g, or t
  misc_feature (1013)..(1013): n is a, c, g, or t
  misc_feature (1029)..(1029): n is a, c, g, or t
  misc_feature (1031)..(1031): n is a, c, g, or t
  misc_feature (1036)..(1036): n is a, c, g, or t
  misc_feature (1055)..(1055): n is a, c, g, or t
  misc_feature (1066)..(1066): n is a, c, g, or t
  misc_feature (1080)..(1080): n is a, c, g, or t
  misc_feature (1082)..(1082): n is a, c, g, or t
  misc_feature (1095)..(1095): n is a, c, g, or t
  misc_feature (1132)..(1132): n is a, c, g, or t
  misc_feature (1143)..(1143): n is a, c, g, or t
  misc_feature (1160)..(1161): n is a, c, g, or t
  misc_feature (1172)..(1172): n is a, c, g, or t
  misc_feature (1178)..(1178): n is a, c, g, or t
  misc_feature (1190)..(1190): n is a, c, g, or t
  misc_feature (1203)..(1203): n is a, c, g, or t
  misc_feature (1207)..(1207): n is a, c, g, or t
  misc_feature (1210)..(1210): n is a, c, g, or t
  misc_feature (1212)..(1212): n is a, c, g, or t
  misc_feature (1217)..(1218): n is a, c, g, or t
  misc_feature (1228)..(1230): n is a, c, g, or t
  misc_feature (1241)..(1241): n is a, c, g, or t
  misc_feature (1249)..(1250): n is a, c, g, or t
  misc_feature (1256)..(1257): n is a, c, g, or t
tagagaaattactatgagaggatcgcatcaccatcaccatcacggatcctatttaggtgacactatagaatcgtcgacccacgcgtccgagcacatcctttactgcattgtggacagcgagtgtaagtcaagggatgtgctccagagttactttgacctcctgggggagctgatgaagttcaacgttgatgcattcaagagattcaataaatatatcaacaccgatgcaaagttccaggtattcctgaagcagatcaacagctccctggtggactccaacatgctggtgcgctgtgtcactctgtccctggaccgatttgaaaaccaggtggatatgaaagttgccgaggtactgtctgaatgccgcctgctcgcctacatatcccaggtgcccacgcagatgtccttcctcttccgcctcatcaacatcatccacgtgcagacgctgacccaggagaacgtcagctgcctcaacaccagcctggtgatcctgatgctggcccgacggaaagagcggctgcccctgtacctgcggctgctgcagcggatggagcacagcaagaagtaccccggcttcctgctcaacaacttccacaacctgctgcgcttctggcagcagcactacctgcacaaggacaaggacagcacctgcctagagaacagctcctgcatcagcttctcatactggaaggagacagtgtccatcctgttgaacccggaccggcagtcaccctctgctctcgttagctacattgaggagccctacatggacatagacagggacttcactgaggagtgaccttgggccaggcctcgggaggctgctgggccagtgtgggtgagcgtgggtacnatgccacacgccctgncctgttcccgttcctccctgctgctctctgcctgccccaggtctttgggtacaggcttggtgggaaggaagtcctaaaagcccttggtccccctgggtctgagggccctaggtcatgganagcctcantccccataatganganaggggaaccatgcccncntttcnttcaaaccctggggcccanggccccccaangtaaaagaaatttnancattacctctggngaactcctgccggtttttgggtgtcatcatcccaaanggggagaaaantgggggaaccccccccnnttgggaacaancccccntgtcctggcttngaaccagaaaagntttnaancntgggnngggggggggnnnaaaaaaggggnttcccaannggcccnn

SEQ ID NO: 348 - DNA, 1148 bp, Homo Sapiens
  misc_feature (967)..(967): n is a, c, g, or t
  misc_feature (978)..(978): n is a, c, g, or t
  misc_feature (997)..(997): n is a, c, g, or t
  misc_feature (1034)..(1034): n is a, c, g, or t
  misc_feature (1037)..(1037): n is a, c, g, or t
  misc_feature (1047)..(1047): n is a, c, g, or t
  misc_feature (1049)..(1049): n is a, c, g, or t
  misc_feature (1058)..(1058): n is a, c, g, or t
  misc_feature (1062)..(1062): n is a, c, g, or t
  misc_feature (1064)..(1064): n is a, c, g, or t
  misc_feature (1068)..(1068): n is a, c, g, or t
  misc_feature (1075)..(1075): n is a, c, g, or t
  misc_feature (1083)..(1083): n is a, c, g, or t
  misc_feature (1095)..(1095): n is a, c, g, or t
  misc_feature (1097)..(1097): n is a, c, g, or t
  misc_feature (1104)..(1104): n is a, c, g, or t
  misc_feature (1118)..(1119): n is a, c, g, or t
  misc_feature (1121)..(1121): n is a, c, g, or t
  misc_feature (1131)..(1131): n is a, c, g, or t
  misc_feature (1133)..(1133): n is a, c, g, or t
  misc_feature (1135)..(1136): n is a, c, g, or t
  misc_feature (1138)..(1139): n is a, c, g, or t
  misc_feature (1142)..(1144): n is a, c, g, or t
gagaaattactatgagaggatcgcatcaccatcaccatcacggatcctatttaggtgacactatagaatcgtcgacccacgcgtccgcagctccttctcggcgtgaacctggtggtgatgccgcccacccgggcccggagtctgcgcttcgttaccttgctgtaccgccatggagaccgttcaccagtgaagacatatcccaaggacccctatcaggaagaagaatggccccaggggtttggtcagttaaccaaggaggggatgctacagcactgggaactgggccaggccctgcggcagcgctatcacggcttcctaaacacctcttatcaccggcaagaggtttatgtgcgaagcacagactttgaccggactctcatgagtgctgaggccaacctggctggactcttccctcccaacgggatgcagcgcttcaacccgaacatctcgtggcagcctattcctgtgcacactgtgcccatcactgaggacaggctgctgaagttcccgttgggcccatgtccccgttatgagcagctgcagaacgagacccggcagacaccagagtatcagaatgagagttctcggaatgcacaatttctggacatggtggccaacgagacagggcttacagacctgacactggagaccgtctggaatgtctatgacacactcttctgtgagcaaacgcacgggctgcgcctgccgccctgggcctcaccccaaaccatgcagcgtctcagccggctaaaggacttcagcttccgcttcctcttcggaatctaccagcaggcggagaaggcccggcttcaggggggagtcctgctggctcagataaggaagaacctgaccctaatggcgaccacctcccagctccccaagctgctggtttactctgcgcacgacactaccctggttgccctgcaaatggcactggatgtctacaatggtgaacaagccccctacncctcctgccanatatttgaactgtacaagnaaaatctgggaatttctcagtggaaatgtactttcgnaanaaaatgaaangncccctggcngctnanctgnctggtgncctcacgntgccaatggagnanttctttncctcaaaaaccgtnngnccaagatggnanannannccnnntgga

SEQ ID NO: 349 - DNA, 947 bp, Homo Sapiens
tgagaggatcgcatcaccatcaccatcacggatcctatttaggtgacactatagaatcgtcgacccacgcgtccggcctgataaccatgctggctgccacagtcctgaccctggccctgctgggcaatgcccatgcctgctccaaaggcacctcgcacgaggcaggcatcgtgtgccgcatcaccaagcctgccctcctggtgttgaaccacgagactgccaaggtgatccagaccgccttccagcgagccagctacccagatatcacgggcgagaaggccatgatgctccttggccaagtcaagtatgggttgcacaacatccagatcagccacttgtccatcgccagcagccaggtggagctggtggaagccaagtccattgatgtctccattcagaacgtgtctgtggtcttcaaggggaccctgaagtatggctacaccactgcctggtggctgggtattgatcagtccattgacttcgagatcgactctgccattgacctccagatcaacacacagctgacctgtgactctggtagagtgcggaccgatgcccctgactgctacctgtctttccataagctgctcctgcatctccaaggggagcgagagcctgggtggatcaagcagctgttcacaaatttcatctccttcaccctgaagctggtcctgaagggacagatctgcaaagagatcaacgtcatctctaacatcatggccgattttgtccagacaagggctgccagcatcctttcagatggagacattggggtggacatttccctgacaggtgatcccgtcatcacagcctcctacctgggagtcccatcacaaggcagtgctggagacctggggcttcaacaccaaccaggaaatcttccaagaggttgtcggcggcttccccagccaggcccaagtcaccgtccactgcctcaagatgcccaa

SEQ ID NO: 350 - DNA, 1103 bp, Homo Sapiens
  misc_feature (2)..(2): n is a, c, g, or t
  misc_feature (894)..(894): n is a, c, g, or t
  misc_feature (898)..(898): n is a, c, g, or t
  misc_feature (904)..(904): n is a, c, g, or t
  misc_feature (933)..(933): n is a, c, g, or t
  misc_feature (935)..(936): n is a, c, g, or t
  misc_feature (938)..(938): n is a, c, g, or t
  misc_feature (944)..(944): n is a, c, g, or t
  misc_feature (947)..(947): n is a, c, g, or t
  misc_feature (953)..(953): n is a, c, g, or t
  misc_feature (964)..(964): n is a, c, g, or t
  misc_feature (967)..(967): n is a, c, g, or t
  misc_feature (999)..(999): n is a, c, g, or t
  misc_feature (1007)..(1007): n is a, c, g, or t
  misc_feature (1009)..(1009): n is a, c, g, or t
  misc_feature (1014)..(1014): n is a, c, g, or t
  misc_feature (1018)..(1018): n is a, c, g, or t
  misc_feature (1020)..(1020): n is a, c, g, or t
  misc_feature (1034)..(1034): n is a, c, g, or t
  misc_feature (1036)..(1036): n is a, c, g, or t
  misc_feature (1043)..(1043): n is a, c, g, or t
  misc_feature (1050)..(1050): n is a, c, g, or t
  misc_feature (1054)..(1054): n is a, c, g, or t
  misc_feature (1060)..(1060): n is a, c, g, or t
  misc_feature (1062)..(1062): n is a, c, g, or t
  misc_feature (1064)..(1064): n is a, c, g, or t
  misc_feature (1066)..(1066): n is a, c, g, or t
  misc_feature (1070)..(1070): n is a, c, g, or t
  misc_feature (1100)..(1100): n is a, c, g, or t
antagagaaattactatgagaggatcgcatcaccatcaccatcacggatcctatttaggtgacactatagaatcgtcgacccacgcgtccgccgcagtcgccgtgaagatggcgtctaccagccgtttggatgctcttccaagagtcacatgtccaaaccatccagatgcgattttagtggaggactacagagccggtgatatgatctgtcctgaatgtggcttggttgtaggtgaccgggttattgatgtgggatctgaatggcgaactttcagcaatgacaaagcaacaaaagatccatctcgagttggagattctcagaatcctcttctgagtgatggagatttgtctaccatgattggcaagggcacaggagctgcaagttttgacgaatttggcaattctaagtaccagaatcggagaacaatgagcagttctgatcgggcaatgatgaatgcattcaaagaaatcactaccatggcagacagaatcaatctacctcgaaatatagttgatcgaacaaataatttattcaagcaagtatatgaacagaagagcctgaagggaagagctaatgatgctatagcttctgcttgtctctatattgcctgtagacaagaaggggttcctaggacatttaaagaaatatgtgccgtatcacgaatttctaagaaagaaattggtcggtgttttaaacttattttgaaagcgctagaaaccagtgtggatttgattacaactggggacttcatgtccaggttctgttccaacctttgtcttcctaaacaagtacagatggcagctacacatatagcccgtaaagctgtggaattggacttggttcctgggaggagccccatctctgtggcagcggcagctatttacatggcctcncagncatcanctgaaaagaggacccaaaaaaaattggananntngctggngtngctgangttacaatcanacngtcctataaactgatctatcctcgagccccanatttgttncntacanactncnaatttgaccccccngnggacaanctacccngctntaaatngngncnctancgtcaattctgaaacaaactttgccggtgnaca

SEQ ID NO: 351 - DNA, 844 bp, Homo Sapiens
  misc_feature (820)..(820): n is a, c, g, or t
  misc_feature (822)..(826): n is a, c, g, or t
  misc_feature (828)..(844): n is a, c, g, or t
atagagaaattactatgagaggatcgcatcaccatcaccatcacggatcctatttaggtgacactatagaatcgtcgacccacgcgtccgacggttttgagttcatgaaacagaatcaggatgccttcgacgtgatcatcactgactcctcagaccccatgggccccgccgaaagtctcttcaaggagtcctattaccagctcatgaagacagccctcaaggaagatggtgtcctctgctgccagggcgagtgccagtggctgcacctggacctcatcaaggagatgcggcagttctgccagtccctgttccccgtggtggcctatgcctactgcaccatccccacctaccccagcggccagatcggcttcatgctgtgcagcaagaacccgagcacgaacttccaggagccggtgcagccgctgacacagcagcaggtggcgcagatgcagctgaagtactacaactccgacgtgcaccgcgccgcctttgtgctgcccgagtttgcccgcaaggccctgaatgatgtgagctgagcccaggcgccaccactgatgccacccaggacctcggaccttggagcctgcggggtgcctcggcccctccagccccgggccggacctcctgctggctctcgcccaccaaccaagtgttacaagccccagaatgctgcccggcctgccctgctgggcggactgtctgtgtgtctgtctctctggcgttccacctccaagcctataccagctgtgtacagcgccatctctctgccttctgttgcccctcactcaccaaacacgtgtatttatagcaaaaaaaaaanannnnnannnnnnnnnnnnnnnnn

SEQ ID NO: 352 - DNA, 1093 bp, Homo Sapiens
  misc_feature (3)..(4): n is a, c, g, or t
  misc_feature (6)..(11): n is a, c, g, or t
  misc_feature (838)..(838): n is a, c, g, or t
  misc_feature (853)..(853): n is a, c, g, or t
  misc_feature (885)..(885): n is a, c, g, or t
  misc_feature (889)..(889): n is a, c, g, or t
  misc_feature (895)..(895): n is a, c, g, or t
  misc_feature (914)..(914): n is a, c, g, or t
  misc_feature (927)..(927): n is a, c, g, or t
  misc_feature (959)..(959): n is a, c, g, or t
  misc_feature (964)..(964): n is a, c, g, or t
  misc_feature (968)..(968): n is a, c, g, or t
  misc_feature (975)..(975): n is a, c, g, or t
  misc_feature (978)..(978): n is a, c, g, or t
  misc_feature (993)..(993): n is a, c, g, or t
  misc_feature (1017)..(1017): n is a, c, g, or t
  misc_feature (1019)..(1019): n is a, c, g, or t
  misc_feature (1022)..(1022): n is a, c, g, or t
  misc_feature (1027)..(1027): n is a, c, g, or t
  misc_feature (1031)..(1031): n is a, c, g, or t
  misc_feature (1043)..(1043): n is a, c, g, or t
  misc_feature (1050)..(1050): n is a, c, g, or t
  misc_feature (1055)..(1055): n is a, c, g, or t
  misc_feature (1057)..(1059): n is a, c, g, or t
  misc_feature (1077)..(1077): n is a, c, g, or t
  misc_feature (1082)..(1082): n is a, c, g, or t
  misc_feature (1090)..(1090): n is a, c, g, or t
  misc_feature (1092)..(1092): n is a, c, g, or t
gtnntnnnnnnaattagagaaattaactatgagaggatcgcatcaccatcaccatcacggatcctatttaggtgacactatagaatcgtcgacccacgcgtccgcgcggctcggcgctcccggcctggcgttgtggcgccgcagcccttgccaccttccctgcacctgccctgcccggcctcatgtaccgcgcgctgtacgcgttccgctcggcggagcccaacgcgctggcgttcgccgcgggcgagaccttcctggtgctagagcgaagcagcgcgcactggtggctggccgcgcgggcgcgcagtggtgagacgggctacgtgccgccagcctacctgcgccgcctgcagggcctggagcaggatgtcctccaggccattgaccgggccatcgaggctgtacacaacacagccatgcgggatggtggcaagtacagcctggaacagcgtggagtcctccagaagctgatccaccaccggaaagagaccctgtcacgcagaggcccttcagcctccagtgttgcagttatgacctcatcaaccagtgaccaccacttggatgctgctgcagccaggcagcccaatggggtgtgtcgagctgggttcgagcggcagcacagcctacccagttctgagcatcttggggcagatggaggcctctaccagatcccacttccatcttcccagatcccaccacagcctcgccgagcagcacccaccacaccgcccccaccagtgaagcgccgagaccgcgaggccctgatggcctctgggagtggtggccacaacaccatgccctccgggggtaactctgtgtccagcggctcctcagtcancacacctccctgganacgctctataccagctccagcccatctgaacnaggntccagntgctcacccaaacccccanctgtgccccgccnaggcacccacaccaccgtgtcccaagtccagnccccntccntcaaggnatnaacaactgaaccccntgaaaaaaaaaaatggcaactggnanaanctcancctnttgataacctgnaaacccntgggnannntgaaccctggggaaccanaaaanaaaaaggnanc

SEQ ID NO: 353 - DNA, 888 bp, Homo Sapiens
  misc_feature (1)..(1): n is a, c, g, or t
  misc_feature (668)..(668): n is a, c, g, or t
  misc_feature (744)..(744): n is a, c, g, or t
  misc_feature (780)..(780): n is a, c, g, or t
  misc_feature (783)..(783): n is a, c, g, or t
  misc_feature (796)..(796): n is a, c, g, or t
  misc_feature (806)..(806): n is a, c, g, or t
  misc_feature (816)..(816): n is a, c, g, or t
  misc_feature (818)..(818): n is a, c, g, or t
  misc_feature (831)..(831): n is a, c, g, or t
  misc_feature (840)..(841): n is a, c, g, or t
  misc_feature (847)..(847): n is a, c, g, or t
  misc_feature (857)..(857): n is a, c, g, or t
  misc_feature (859)..(859): n is a, c, g, or t
  misc_feature (862)..(862): n is a, c, g, or t
  misc_feature (869)..(871): n is a, c, g, or t
  misc_feature (873)..(873): n is a, c, g, or t
  misc_feature (877)..(878): n is a, c, g, or t
  misc_feature (880)..(880): n is a, c, g, or t
  misc_feature (884)..(885): n is a, c, g, or t
nattagagaaattactatgagaggatcgcatcaccatcaccatcacggatcctatttaggtgacactatagaatcgtcgacccacgcgtccgggagcagcaaacggccggcggcgggtgccgcgcggggggcgggcggcgcggagtaggtggcggcggccatggccgaggcgtcgccgcatcccggacggtacttctgccactgctgctccgtggagatcgtcccgcgcctgccggattatatctgtccaagatgcgagtctggttttatcgaggagcttccggaagagaccaggagcacagaaaatggttctgccccctccacagctcccacagaccagagccggccaccgttggagcacgtggaccagcacctgttcacgctgccgcagggctacggacagtttgctttcggcatcttcgatgacagcttcgagatccccacgttccctcctggggcgcaggctgacgacggcagggaccctgagagccggcgggagagagaccatccgtcccggcaccggtacggcgcccgacagccccgcgcccgcctcaccacgcggcgggccaccggccggcacgaaggcgtccccacgctggaagggtgagggggccccgggggtggccgcgagggccccacgccttgaggtcggaagttctggcgcttanaatccagcacgggttccacggaaacgtggcatcatccataggctctctggagaggccgcccggccaggccctccanccccctgtgactccccacacggcccttcggaaacanaantatgccggttcanggtgtgtggnttgaccacanantggggcaccgtgngcctgccanncccacntgctctgganantgntgtccannncntgtnntnaaannctg

SEQ ID NO: 354 - DNA, 1179 bp, Homo Sapiens
  misc_feature (925)..(925): n is a, c, g, or t
  misc_feature (940)..(940): n is a, c, g, or t
  misc_feature (947)..(947): n is a, c, g, or t
  misc_feature (957)..(957): n is a, c, g, or t
  misc_feature (964)..(964): n is a, c, g, or t
  misc_feature (975)..(975): n is a, c, g, or t
  misc_feature (1019)..(1019): n is a, c, g, or t
  misc_feature (1033)..(1033): n is a, c, g, or t
  misc_feature (1041)..(1041): n is a, c, g, or t
  misc_feature (1047)..(1047): n is a, c, g, or t
  misc_feature (1072)..(1072): n is a, c, g, or t
  misc_feature (1082)..(1082): n is a, c, g, or t
  misc_feature (1089)..(1090): n is a, c, g, or t
  misc_feature (1092)..(1092): n is a, c, g, or t
  misc_feature (1098)..(1098): n is a, c, g, or t
  misc_feature (1103)..(1104): n is a, c, g, or t
  misc_feature (1110)..(1110): n is a, c, g, or t
  misc_feature (1119)..(1119): n is a, c, g, or t
  misc_feature (1126)..(1126): n is a, c, g, or t
  misc_feature (1137)..(1137): n is a, c, g, or t
  misc_feature (1139)..(1139): n is a, c, g, or t
  misc_feature (1158)..(1158): n is a, c, g, or t
  misc_feature (1160)..(1160): n is a, c, g, or t
  misc_feature (1162)..(1162): n is a, c, g, or t
  misc_feature (1168)..(1168): n is a, c, g, or t
aatagagaaattactatgagaggatcgcatcaccatcaccatcacggatcctatttaggtgacactatagaatcgtcgacccacgcgtccggccgctgctcgcgggctgagtgtctgtcgctgctgccgcctccacccagcctccgccatggacctcttcggggacctgccggagcccgagcgctcgccgcgcccggctgccgggaaagaagctcagaaaggacccctgctctttgatgacctccctccggccagcagtactgactcaggatcagggggacctttgctttttgatgatctcccacccgctagcagtggcgattcaggttctcttgccacatcaatatcccagatggtaaagactgaagggaaaggagcaaagagaaaaacctccgaggaagagaagaatggcagtgaagagcttgtggaaaagaaagtttgttaagcctcttcggtgatctttggtctgaagggctatgtggctgagcggaagggtgagagggaggagatgcaggatgcccacgtcatcctgaacgacatcaccgaggagtgtaggcccccatcgtccctcattactcgggtttcatattttgctgtttttgatggacatggaggaattcgagcctcaaaatttgctgcacagaatttgcatcaaaacttaatcagaaaatttcctaaaggagatgtaatcagtgtagagaaaaccgtgaagagatgccttttggacactttcaagcatactgatgaagagttccttaaacaagcttccagccagaagcctgcctggaaagatgggtccactgccacgtgtgttctggctgtagacaacattctttatattgccaacctcggagatagtcgggcaatcttgtgtcgttataatgaggagagtcaaaaacatgcagccttaagcctcagcaaagancataatccaactcantatgaanagcggatgangataccnaaggctggagnaaacgtcagggatgggcgtgttttgggccgtgctaaaggtgtcncgctccattggggnacgggcantacaanccctgcggggtcacctctgtgcccnaaatcaaaanctgccanntnaccccnatgannggttcnttttttggnctgggangggcttttcangnctttaccccaaaaaaaccngnantttttnttgtctttttc

SEQ ID NO: 355 - DNA, 1256 bp, Homo Sapiens
  misc_feature (2)..(2): n is a, c, g, or t
  misc_feature (844)..(844): n is a, c, g, or t
  misc_feature (865)..(865): n is a, c, g, or t
  misc_feature (886)..(886): n is a, c, g, or t
  misc_feature (904)..(904): n is a, c, g, or t
  misc_feature (914)..(914): n is a, c, g, or t
  misc_feature (916)..(916): n is a, c, g, or t
  misc_feature (956)..(956): n is a, c, g, or t
  misc_feature (963)..(963): n is a, c, g, or t
  misc_feature (965)..(965): n is a, c, g, or t
  misc_feature (984)..(984): n is a, c, g, or t
  misc_feature (988)..(988): n is a, c, g, or t
  misc_feature (991)..(991): n is a, c, g, or t
  misc_feature (1005)..(1005): n is a, c, g, or t
  misc_feature (1015)..(1015): n is a, c, g, or t
  misc_feature (1025)..(1027): n is a, c, g, or t
  misc_feature (1029)..(1029): n is a, c, g, or t
  misc_feature (1044)..(1044): n is a, c, g, or t
  misc_feature (1055)..(1055): n is a, c, g, or t
  misc_feature (1059)..(1059): n is a, c, g, or t
  misc_feature (1061)..(1061): n is a, c, g, or t
  misc_feature (1070)..(1070): n is a, c, g, or t
  misc_feature (1079)..(1079): n is a, c, g, or t
  misc_feature (1083)..(1083): n is a, c, g, or t
  misc_feature (1088)..(1088): n is a, c, g, or t
  misc_feature (1090)..(1090): n is a, c, g, or t
  misc_feature (1100)..(1100): n is a, c, g, or t
  misc_feature (1105)..(1105): n is a, c, g, or t
  misc_feature (1125)..(1126): n is a, c, g, or t
  misc_feature (1129)..(1129): n is a, c, g, or t
  misc_feature (1134)..(1134): n is a, c, g, or t
  misc_feature (1143)..(1144): n is a, c, g, or t
  misc_feature (1159)..(1159): n is a, c, g, or t
  misc_feature (1163)..(1163): n is a, c, g, or t
  misc_feature (1165)..(1165): n is a, c, g, or t
  misc_feature (1178)..(1178): n is a, c, g, or t
  misc_feature (1193)..(1193): n is a, c, g, or t
  misc_feature (1205)..(1205): n is a, c, g, or t
  misc_feature (1210)..(1210): n is a, c, g, or t
  misc_feature (1212)..(1212): n is a, c, g, or t
  misc_feature (1228)..(1229): n is a, c, g, or t
  misc_feature (1234)..(1234): n is a, c, g, or t
  misc_feature (1238)..(1238): n is a, c, g, or t
  misc_feature (1243)..(1243): n is a, c, g, or t
  misc_feature (1246)..(1246): n is a, c, g, or t
  misc_feature (1248)..(1248): n is a, c, g, or t
antagagaaattactatgagaggatcgcatcaccatcaccatcacggatcctatttaggtgacactatagaatcgtcgacccacgcgtccgccggcggccatggcggccgttctgaagccggtgctgctgggccttcgagatgcgccggtgcacggcagccccacagggccgggtgcctggactgctagcaagctgggcggcattccggatgctctgcccaccgtggctgcgcccaggcccgtgtgtcagcgctgcgggcagccgctcgctctggtcgtgcaggtgtattgcccgctggaaggctccccgtttcaccgtctgctgcacgtgttcgcgtgcgcctgccccggctgtagcaccggcggtgcgcgcagctggaaggtgttccgctcccagtgcctgcaggtgccagagagagaggcgcaggacgctcagaaacagggaaacagccttgcagctgaggactggtgtgaaggtgctgatgactggggaagtgatactgaggaggggccttcaccacagtttaccttggattttgggaatgatgccagcagtgccaaagacgtagactggactgctcggctccaagacctccgcctgcaggatgctgtcctgggtgctgcccatcctgtgcctcctgggctgccgctcttcctgccctactacatctgtgttgcagatgaggatgattacagggactttgtcaacctggatcatgcccacagccttctgagggactatcagcagagagaaggcattgccatggatcagttgctttcccaaagccttcctaatgatggtgatgaaaaatatgagaagaccataattaaaagtggagatcanacgttttacaaattcatgaancgaattgctgcttgtcaggancaaattttgaagtattcntggagtgaananccactctttttgacctgcccctacatcaaaaatcaccganctcccancntgcaaccagtgtggaggcnaaanganatttgaattttcancttatgccancactggtcannntnctcaaaaatgccaanttaagtctttntgtngnaatttgaanaattttaanttancaatntnaaaaaaattnctggnccccaaatcatcaaaatccnntgnaaaantttttattnnaaaaaaaaaccaaanaaantntttttaaaaaaanatttctttttaaaanaaataaaaaatntttantncaaaaaaaaaaaaggnnccccncccnaaggnccnanaaacttat

SEQ ID NO: 356 - DNA, 1303 bp, Homo Sapiens
  misc_feature (931)..(931): n is a, c, g, or t
  misc_feature (968)..(968): n is a, c, g, or t
  misc_feature (970)..(970): n is a, c, g, or t
  misc_feature (1003)..(1003): n is a, c, g, or t
  misc_feature (1009)..(1009): n is a, c, g, or t
  misc_feature (1026)..(1026): n is a, c, g, or t
  misc_feature (1041)..(1041): n is a, c, g, or t
  misc_feature (1050)..(1050): n is a, c, g, or t
  misc_feature (1070)..(1070): n is a, c, g, or t
  misc_feature (1075)..(1075): n is a, c, g, or t
  misc_feature (1079)..(1079): n is a, c, g, or t
  misc_feature (1087)..(1087): n is a, c, g, or t
  misc_feature (1090)..(1090): n is a, c, g, or t
  misc_feature (1111)..(1111): n is a, c, g, or t
  misc_feature (1113)..(1113): n is a, c, g, or t
  misc_feature (1138)..(1138): n is a, c, g, or t
  misc_feature (1158)..(1159): n is a, c, g, or t
  misc_feature (1165)..(1165): n is a, c, g, or t
  misc_feature (1169)..(1169): n is a, c, g, or t
  misc_feature (1173)..(1173): n is a, c, g, or t
  misc_feature (1178)..(1178): n is a, c, g, or t
  misc_feature (1185)..(1185): n is a, c, g, or t
  misc_feature (1202)..(1202): n is a, c, g, or t
  misc_feature (1214)..(1214): n is a, c, g, or t
  misc_feature (1222)..(1222): n is a, c, g, or t
  misc_feature (1230)..(1230): n is a, c, g, or t
  misc_feature (1237)..(1237): n is a, c, g, or t
  misc_feature (1246)..(1246): n is a, c, g, or t
  misc_feature (1248)..(1248): n is a, c, g, or t
  misc_feature (1253)..(1255): n is a, c, g, or t
  misc_feature (1261)..(1262): n is a, c, g, or t
  misc_feature (1270)..(1270): n is a, c, g, or t
  misc_feature (1290)..(1291): n is a, c, g, or t
  misc_feature (1296)..(1297): n is a, c, g, or t
tagagaaattactatgagaggatcgcatcaccatcaccatcacggatcctatttaggtgacactatagaatcgtcgacccacgcgtccgcccacgcgtccgaaagttacaaatgtgaagagtgtggcaaagcctttggatggtccatagccctgaatcaacacaagaaaattcatactggagaaaaaccttacaaatgtgaagagtgtggcaaagcctttagtaggtcaagaaaccttactacacataggagagttcacactagggagaaaccctacaaatgtgaagatcgtggcagatcctttggatggtccacaaacctgaacgaatataagaaaattcatactggagataaactctacaaatgtaaagaatgtgggaaagtgtttaaacagtcctcacacctgaatagacatgagaaaattcatactggaaagaaaccctacaaatgtaaggaatgtggcaaagtcattacgtcatcctcaagctttgctaaacataagaggattcatacaggtgagaaaccctttaaatgtttagaatgtggtaaagcgtttactagttccacaacccttactaaacataggagaattcatactggagagaaaccctacacatgtgaagaatgtggcaaagcctttagacagtcagcaatcctttatgtacataggagaattcatactggagagaaaccctacacatgtggagaatgtggcaaaacctttagacagtctgcaaatctttatgcgcataagaaaattcatactggagagaaaccctacacgtgtggagactgtggcaaaacctttagacagtctgcaaatctttatgcacataagaaaattcatactggagataaaaccatacaagtgtaaagaatgtggtaaagcctttaagtcatactacagcattcttaaacataagagaactcntaccagggggaatgtcttacgaaggggacgaatgtcncnggtctttaaatgctccccaatcctttctaatcntaaganaattcctaaaggaaaanaaacctctaaaatgngaaaaatgngaaaaaggcttttaatcccnccccnatcnggttgtanacntaaaagtaatttttttggtgnanaagcccaatttaaatttaaaatggnggcaaaacttccaattccannccgttnttangganttccnacggaanaaaacccctggaaatanaaaaatgggggnaaacttgnaaccaagncttaacntttttgccncngaaannnttttannggggaacnccttgtccaacctaaaaatnncaaanncttttg

SEQ ID NO: 357 - DNA, 1184 bp, Homo Sapiens
  misc_feature (825)..(825): n is a, c, g, or t
  misc_feature (851)..(851): n is a, c, g, or t
  misc_feature (854)..(854): n is a, c, g, or t
  misc_feature (915)..(915): n is a, c, g, or t
  misc_feature (943)..(943): n is a, c, g, or t
  misc_feature (969)..(969): n is a, c, g, or t
  misc_feature (1009)..(1009): n is a, c, g, or t
  misc_feature (1024)..(1024): n is a, c, g, or t
  misc_feature (1028)..(1028): n is a, c, g, or t
  misc_feature (1030)..(1030): n is a, c, g, or t
  misc_feature (1033)..(1033): n is a, c, g, or t
  misc_feature (1051)..(1051): n is a, c, g, or t
  misc_feature (1055)..(1055): n is a, c, g, or t
  misc_feature (1062)..(1062): n is a, c, g, or t
  misc_feature (1065)..(1065): n is a, c, g, or t
  misc_feature (1070)..(1070): n is a, c, g, or t
  misc_feature (1078)..(1078): n is a, c, g, or t
  misc_feature (1082)..(1082): n is a, c, g, or t
  misc_feature (1084)..(1084): n is a, c, g, or t
  misc_feature (1089)..(1089): n is a, c, g, or t
  misc_feature (1094)..(1094): n is a, c, g, or t
  misc_feature (1099)..(1099): n is a, c, g, or t
  misc_feature (1110)..(1110): n is a, c, g, or t
  misc_feature (1114)..(1114): n is a, c, g, or t
  misc_feature (1126)..(1127): n is a, c, g, or t
  misc_feature (1130)..(1130): n is a, c, g, or t
  misc_feature (1139)..(1139): n is a, c, g, or t
  misc_feature (1142)..(1142): n is a, c, g, or t
  misc_feature (1165)..(1165): n is a, c, g, or t
  misc_feature (1167)..(1168): n is a, c, g, or t
  misc_feature (1174)..(1174): n is a, c, g, or t
  misc_feature (1177)..(1177): n is a, c, g, or t
  misc_feature (1184)..(1184): n is a, c, g, or t
agagaaattactatgagaggatcgcatcaccatcaccatcacggatcctatttaggtgacactatagaatcgtcgacccacgcgtccgggcgcctgcctccccagcaaatcgagaaaaacctcagcgacctgatcgacctggtccccagtctatgtgaggatctcctgtcttctgttgaccagccactgaaaattgccagagacaaggtggtgggaaaggattaccttttgtgtgactacaacagagatggggactcctataggtcaccatggagtaacaagtatgaccctcccttggaggatggggccatgccgtcagctcggctgagaaagctggaggtggaagccaacaatgcctttgaccagtatcgagacctgtattttgaaggtggcgtctcatctgtctacctctgggatctggatcatggctttgctggagtgatcctcataaagaaggctggagatggatcaaagaagatcaaaggctgctgggattccatccacgtggtagaagtgcaggagaaatccagcggtcgcaccgcccattacaagttgacctccacggtgatgctgtggctgcagaccaacaaatctggctctggcaccatgaacctcggaggcagccttaccagacagatggagaaggatgaaactgtgagtgactgctccccacacatagccaacatcgggcgcctggtagaggacatggaaaataaaatcagaagtacgctgaacgagatctactttggaaaaacaaaggatatcgtcaatgggctgaggtctgtgcagacttttgcagacaaatcaaaacaagaagctctgaanaatgacctggtggaggctttgaaganaangcagcaatgctaaacctctgtttcatgctaaccagacacgccgtgcactcgttaaattccntttcttaaaaaactcgttttctgctccnttccctcgtcccttcccctcccgaanagggtcacataacagctgcatcattgaccgcacagcgccntctctccctgaaaanaaancnaanagccaccctccttcgggntccnaacctgnttntgccnaacctcgntctnanttttnccccnatttncataaaaaccngggnggtttttttttnnccngggcccccnttnttcttcctggccccccttttaangnnaaaaanccntgttggn

SEQ ID NO: 358 - DNA, 1348 bp, Homo Sapiens
  misc_feature (808)..(808): n is a, c, g, or t
  misc_feature (868)..(868): n is a, c, g, or t
  misc_feature (885)..(885): n is a, c, g, or t
  misc_feature (909)..(909): n is a, c, g, or t
  misc_feature (975)..(975): n is a, c, g, or t
  misc_feature (988)..(988): n is a, c, g, or t
  misc_feature (1031)..(1033): n is a, c, g, or t
  misc_feature (1053)..(1053): n is a, c, g, or t
  misc_feature (1056)..(1056): n is a, c, g, or t
  misc_feature (1063)..(1063): n is a, c, g, or t
  misc_feature (1065)..(1065): n is a, c, g, or t
  misc_feature (1084)..(1084): n is a, c, g, or t
  misc_feature (1090)..(1090): n is a, c, g, or t
  misc_feature (1098)..(1098): n is a, c, g, or t
  misc_feature (1100)..(1100): n is a, c, g, or t
  misc_feature (1104)..(1104): n is a, c, g, or t
  misc_feature (1112)..(1112): n is a, c, g, or t
  misc_feature (1116)..(1117): n is a, c, g, or t
  misc_feature (1124)..(1124): n is a, c, g, or t
  misc_feature (1129)..(1130): n is a, c, g, or t
  misc_feature (1134)..(1134): n is a, c, g, or t
  misc_feature (1165)..(1165): n is a, c, g, or t
  misc_feature (1169)..(1169): n is a, c, g, or t
  misc_feature (1177)..(1178): n is a, c, g, or t
  misc_feature (1186)..(1186): n is a, c, g, or t
  misc_feature (1202)..(1202): n is a, c, g, or t
  misc_feature (1205)..(1206): n is a, c, g, or t
  misc_feature (1209)..(1209): n is a, c, g, or t
  misc_feature (1223)..(1223): n is a, c, g, or t
  misc_feature (1226)..(1226): n is a, c, g, or t
  misc_feature (1240)..(1240): n is a, c, g, or t
  misc_feature (1246)..(1246): n is a, c, g, or t
  misc_feature (1250)..(1250): n is a, c, g, or t
  misc_feature (1255)..(1256): n is a, c, g, or t
  misc_feature (1263)..(1263): n is a, c, g, or t
  misc_feature (1267)..(1267): n is a, c, g, or t
  misc_feature (1274)..(1274): n is a, c, g, or t
  misc_feature (1276)..(1276): n is a, c, g, or t
  misc_feature (1297)..(1297): n is a, c, g, or t
  misc_feature (1301)..(1301): n is a, c, g, or t
  misc_feature (1314)..(1314): n is a, c, g, or t
  misc_feature (1319)..(1319): n is a, c, g, or t
  misc_feature (1327)..(1327): n is a, c, g, or t
  misc_feature (1332)..(1332): n is a, c, g, or t
  misc_feature (1334)..(1334): n is a, c, g, or t
  misc_feature (1343)..(1343): n is a, c, g, or t
tagagaaattactatgagaggatcgcatcaccatcaccatcacggatcctatttaggtgacactatagaatcgtcgacccacgcgtccggtgagaccaccagccacctgatgggcatgttctaccgcaccattcgcatgatggagaacggcatcaagcccgtgtatgtctttgatggcaagccgccacagctcaagtcaggcgagctggccaaacgcagtgagcggcgggctgaggcagagaagcagctgcagcaggctcaggctgctggggccgagcaggaggtggaaaaattcactaagcggctggtgaaggtcactaagcagcacaatgatgagtgcaaacatctgctgagcctcatgggcatcccttatcttgatgcacccagtgaggcagaggccagctgtgctgccctggtgaaggctggcaaagtctatgctgcggctaccgaggacatggactgcctcaccttcggcagccctgtgctaatgcgacacctgactgccagtgaagccaaaaagctgccaatccaggaattccacctgagccggattctgcaggagctgggcctgaaccaggaacagtttgtggatctgtgcatcctgctaggcagtgactactgtgagagtatccggggtattgggcccaagcgggctgtggacctcatccagaagcacaagagcatcaagaggctgagtaagagccgccaaggcagcacccagggccgcctggatgatttcttcaaggtgaccggctcactctcttcagctaagcgcaaggagccagaacccaagggatccactaagaanaaggcaaagactggggcagcagggaagtttaaaaggggaaaataaatgtgtttccccatnatacctccttcacccanaatatttgccgtcttgtacccttnaaaagctacagctagaaaaaccttcacggggtggaagaaaggattctaaggcttttctagcgtganccttttcagaagngctaagtccctttttacttgatcttaatgggcaaaaaggcccnnnaggtacttttccttttttanctnagaaaantnttcaggttcaaaccccttntcaggnagtttatngnaccnaatccctntttnntgaaagnaaaannacancaattttgaaaaaaaaaaggaaaaaaagggnaaanaaaaattnnaaaaaatntttttggcggccactnggnnccnggggaagggggggnacnaaaaatggcttttntgtttnttcnccttnnccccctngaanaaccccncnaaggccccttttaaaatgganaacntttaaaaaaaggnaaacngccccccnaattngnttctttttnaaaaa

SEQ ID NO: 359 - DNA, 1138 bp, Homo Sapiens
  misc_feature (897)..(897): n is a, c, g, or t
  misc_feature (912)..(912): n is a, c, g, or t
  misc_feature (923)..(923): n is a, c, g, or t
  misc_feature (942)..(942): n is a, c, g, or t
  misc_feature (954)..(954): n is a, c, g, or t
  misc_feature (975)..(975): n is a, c, g, or t
  misc_feature (982)..(982): n is a, c, g, or t
  misc_feature (986)..(986): n is a, c, g, or t
  misc_feature (998)..(998): n is a, c, g, or t
  misc_feature (1003)..(1003): n is a, c, g, or t
  misc_feature (1007)..(1007): n is a, c, g, or t
  misc_feature (1012)..(1012): n is a, c, g, or t
  misc_feature (1014)..(1014): n is a, c, g, or t
  misc_feature (1016)..(1016): n is a, c, g, or t
  misc_feature (1020)..(1020): n is a, c, g, or t
  misc_feature (1025)..(1025): n is a, c, g, or t
  misc_feature (1033)..(1033): n is a, c, g, or t
  misc_feature (1046)..(1046): n is a, c, g, or t
  misc_feature (1049)..(1049): n is a, c, g, or t
  misc_feature (1058)..(1059): n is a, c, g, or t
  misc_feature (1063)..(1063): n is a, c, g, or t
  misc_feature (1068)..(1068): n is a, c, g, or t
  misc_feature (1099)..(1099): n is a, c, g, or t
  misc_feature (1104)..(1104): n is a, c, g, or t
  misc_feature (1114)..(1114): n is a, c, g, or t
  misc_feature (1132)..(1132): n is a, c, g, or t
  misc_feature (1135)..(1135): n is a, c, g, or t
caatagagaaattactatgagaggatcgcatcaccatcaccatcacggatcctatttaggtgacactatagaatcgtcgacccacgcgtccgcggacgcgtggggttcgagccgccgcccgaaaggccgggccgtcgtcttaggaggagtcgccgccgccgccacctccgccatggagctgatcaccattctcgagaagaccgtgtctcccgatcggctggagctggaagcggcgcagaagttcctggagcgtgcggccgtggagaacctgcccactttccttgtggaactgtccagagtgctggcaaatccaggaaacagtcaggttgccagagttgcagctggtctacaaatcaagaactctttgacatctaaagatccagatatcaaggcacaatatcagcagaggtggcttgctattgatgctaatgctcgacgagaagtcaagaactatgttttgcagacattgggtacagaaacttaccggcctagttctgcctcacagtgtgtggctggtattgcttgtgcagagatcccagtaaaccagtggccagaactcattcctcagctggtggccaatgtcacaaaccccaacagcacagagcacatgaaggagtcgacattggaagccatcggttatatttgccaagatatagacccagagcagctacaagataaatccaatgagattctgactgccataatccaggggatgaggaaagaagagcctagtaataatgtgaagctagctgctacgaatgcactcctgaactcattggagttcaccaaagcaaactttgataaagagtctgaaaggcactttattatgcaggtggtctgtgaagccacacagtgtccagatacgagggtacgaagtggctgcttttacagaatctnggtgaagaataatgntccttatattnatcagtacattgaaaacantatattggggtncctgctctttttttgcaatcncaattcnaaancaattgaaaaantgganattngaagnangnggcntttanaagggganaaaaatttttggnccnaatgttctnngaangaagnaaatggaattttggccatttgaaaccttccnaaagncagccaaaanaagggacggccccctganacnccc

SEQ ID NO: 360 - DNA, 1175 bp, Homo Sapiens
  misc_feature (4)..(4): n is a, c, g, or t
  misc_feature (895)..(895): n is a, c, g, or t
  misc_feature (902)..(902): n is a, c, g, or t
  misc_feature (938)..(938): n is a, c, g, or t
  misc_feature (951)..(951): n is a, c, g, or t
  misc_feature (958)..(958): n is a, c, g, or t
  misc_feature (960)..(960): n is a, c, g, or t
  misc_feature (974)..(974): n is a, c, g, or t
  misc_feature (978)..(978): n is a, c, g, or t
  misc_feature (996)..(996): n is a, c, g, or t
  misc_feature (998)..(998): n is a, c, g, or t
  misc_feature (1005)..(1005): n is a, c, g, or t
  misc_feature (1037)..(1037): n is a, c, g, or t
  misc_feature (1041)..(1041): n is a, c, g, or t
  misc_feature (1053)..(1053): n is a, c, g, or t
  misc_feature (1058)..(1058): n is a, c, g, or t
  misc_feature (1065)..(1065): n is a, c, g, or t
  misc_feature (1089)..(1089): n is a, c, g, or t
  misc_feature (1107)..(1107): n is a, c, g, or t
  misc_feature (1111)..(1111): n is a, c, g, or t
  misc_feature (1113)..(1113): n is a, c, g, or t
  misc_feature (1117)..(1117): n is a, c, g, or t
  misc_feature (1128)..(1128): n is a, c, g, or t
  misc_feature (1134)..(1134): n is a, c, g, or t
  misc_feature (1136)..(1136): n is a, c, g, or t
  misc_feature (1145)..(1146): n is a, c, g, or t
  misc_feature (1159)..(1159): n is a, c, g, or t
gatngagagattactatgagaggatcgcatcaccatcaccatcacggatcctatttaggtgacactatagaatcgtcgacccacgcgtccgggatctcagattttggcaacatctcagccacagcgggtgaaaactacagtgtcgtctcctgggtccccaaggagggccagtgcaacttcaggttccatatcttgttcaaagccttgggagaagagaagggtggggcttccctttcgccacagtatgtcagctacaaccagagctcctacacgcagtgggacctgcagcctgacactgactacgagatccacttgtttaaggagaggatgttccggcaccaaatggctgtgaagaccaatggcacaggccgcgtgaggctccctcctgctggcttcgccactgagggctggttcatcggctttgtgagtgccatcatcctcctgctcctcgtcctgctcatcctctgcttcatcaagcgcagcaagggcggcaaatactcagtgaaggataaggaggacacccaggtggactctgaggcccgaccgatgaaagatgagaccttcggcgagtacaggtccctggagagtgacaacgaggagaaggcctttggcagcagccagccatcgctcaacggggacatcaagcccctgggcagtgacgacagcctggccgattatgggggcagcgtggatgttcagttcaacgaggatggttcgttcattggccagtacagtggcaagaaggagaaggaggcggcagggggcaatgacagctcaggggccacttcccccatcaaccctgccgtggccctagaatagtggagtccaggacaggagatgctgtgcccctggccttgggatccaggcccctccctctccagcaggcccatgggangctgganttggggcaaaagaaaacttgctgcctcggatccccnttcctaccacccnggtcccnantttattgccaaaanccanctgccccccttcctgggnanacgctgntctgccccagcttgggcaaatctcccaaatgnccangggcctttgggngctgntttgccncccatttgggcaaaaaggctttgnttgggggaaaaaaaatangggngncccnaaaggttcccnaaaggngncttttttgnncccgaaggggggnaaaaatgggggggttc

SEQ ID NO: 361 - DNA, 1179 bp, Homo Sapiens
  misc_feature (838)..(838): n is a, c, g, or t
  misc_feature (908)..(908): n is a, c, g, or t
  misc_feature (924)..(924): n is a, c, g, or t
  misc_feature (939)..(939): n is a, c, g, or t
  misc_feature (954)..(954): n is a, c, g, or t
  misc_feature (966)..(966): n is a, c, g, or t
  misc_feature (972)..(972): n is a, c, g, or t
  misc_feature (986)..(986): n is a, c, g, or t
  misc_feature (999)..(1000): n is a, c, g, or t
  misc_feature (1014)..(1014): n is a, c, g, or t
  misc_feature (1018)..(1018): n is a, c, g, or t
  misc_feature (1029)..(1029): n is a, c, g, or t
  misc_feature (1038)..(1038): n is a, c, g, or t
  misc_feature (1094)..(1094): n is a, c, g, or t
  misc_feature (1097)..(1097): n is a, c, g, or t
  misc_feature (1104)..(1104): n is a, c, g, or t
  misc_feature (1106)..(1106): n is a, c, g, or t
  misc_feature (1111)..(1111): n is a, c, g, or t
  misc_feature (1133)..(1133): n is a, c, g, or t
  misc_feature (1138)..(1138): n is a, c, g, or t
  misc_feature (1142)..(1142): n is a, c, g, or t
  misc_feature (1146)..(1146): n is a, c, g, or t
  misc_feature (1156)..(1156): n is a, c, g, or t
  misc_feature (1163)..(1163): n is a, c, g, or t
  misc_feature (1169)..(1169): n is a, c, g, or t
  misc_feature (1172)..(1172): n is a, c, g, or t
  misc_feature (1174)..(1174): n is a, c, g, or t
agaaattactatgagaggatcgcatcaccatcaccatcacggatcctatttaggtgacactatagaatcgtcgacccacgcgtccgcccacgcgtccgtcatgacccatgaagagcaccatgcagccaaaaccctggggattggcaaagccattgctgtcttaacctctggtggagatgcccaaggtatgaatgctgctgtcagggctgtggttcgagttggtatcttcaccggtgcccgtgtcttctttgtccatgagggttatcaaggcctggtggatggtggagatcacatcaaggaagccacctgggagagcgtttcgatgatgcttcagctgggaggcacggtgattggaagtgcccggtgcaaggactttcgggaacgagaaggacgactccaagctgcctacaacctggtgaagcgtgggatcaccaatctctgtgtcattgggggtgatggcagcctcactggggctgacaccttccgttctgagtggagtgacttgttgagtgacctccagaaagcaggtaagatcacagatgaggaggctacgaagtccagctacctgaacattgtgggcctggttgggtcaattgacaatgacttctgtggcaccgatatgaccattggcactgactctgccctgcatcggatcatggaaattgtagatgccatcactaccactgcccagagccaccagaggacatttgtgttagaagtaatgggccgccactgtggatacctggcccttgtcacctctctgtcctgtggggccgactgggtttttattcctgaatgtccaccagatgacgactgggaaggaacacctttgtcgccnaactcagcgagacaaggacccgtggttctcgtctcaacatcatcattgtggctgagggtgcaattgacanaatggaaaaccaatcncctcaaaacatcaanaatctggtggttaancgtctgggaaantgaacncccgggttactgtnttggggcatgtgnnaaaaggggtgggancccnttcaccctttnaaaaaaatnctgggcaaacaaggaatgggggggggaaaccaatgatgggccctttttggaagggnaancccaaananccccncccctgggtaagggaacccttntgggnaacnaagnttgggccccngcccccncatggnaangntttcc

SEQ ID NO: 362 - DNA, 1376 bp, Homo Sapiens
  misc_feature (850)..(850): n is a, c, g, or t
  misc_feature (919)..(919): n is a, c, g, or t
  misc_feature (948)..(948): n is a, c, g, or t
  misc_feature (972)..(972): n is a, c, g, or t
  misc_feature (987)..(987): n is a, c, g, or t
  misc_feature (989)..(989): n is a, c, g, or t
  misc_feature (994)..(994): n is a, c, g, or t
  misc_feature (1001)..(1001): n is a, c, g, or t
  misc_feature (1005)..(1006): n is a, c, g, or t
  misc_feature (1008)..(1008): n is a, c, g, or t
  misc_feature (1023)..(1023): n is a, c, g, or t
  misc_feature (1046)..(1046): n is a, c, g, or t
  misc_feature (1048)..(1048): n is a, c, g, or t
  misc_feature (1054)..(1054): n is a, c, g, or t
  misc_feature (1058)..(1058): n is a, c, g, or t
  misc_feature (1061)..(1061): n is a, c, g, or t
  misc_feature (1073)..(1073): n is a, c, g, or t
  misc_feature (1077)..(1077): n is a, c, g, or t
  misc_feature (1085)..(1085): n is a, c, g, or t
  misc_feature (1087)..(1087): n is a, c, g, or t
  misc_feature (1097)..(1097): n is a, c, g, or t
  misc_feature (1102)..(1102): n is a, c, g, or t
  misc_feature (1104)..(1104): n is a, c, g, or t
  misc_feature (1113)..(1113): n is a, c, g, or t
  misc_feature (1128)..(1128): n is a, c, g, or t
  misc_feature (1133)..(1133): n is a, c, g, or t
  misc_feature (1139)..(1139): n is a, c, g, or t
  misc_feature (1142)..(1142): n is a, c, g, or t
  misc_feature (1148)..(1148): n is a, c, g, or t
  misc_feature (1156)..(1156): n is a, c, g, or t
  misc_feature (1174)..(1174): n is a, c, g, or t
  misc_feature (1176)..(1177): n is a, c, g, or t
  misc_feature (1187)..(1187): n is a, c, g, or t
  misc_feature (1196)..(1196): n is a, c, g, or t
  misc_feature (1201)..(1201): n is a, c, g, or t
  misc_feature (1207)..(1210): n is a, c, g, or t
  misc_feature (1231)..(1231): n is a, c, g, or t
  misc_feature (1233)..(1233): n is a, c, g, or t
  misc_feature (1245)..(1245): n is a, c, g, or t
  misc_feature (1251)..(1251): n is a, c, g, or t
  misc_feature (1254)..(1254): n is a, c, g, or t
  misc_feature (1270)..(1270): n is a, c, g, or t
  misc_feature (1276)..(1276): n is a, c, g, or t
  misc_feature (1287)..(1287): n is a, c, g, or t
  misc_feature (1290)..(1290): n is a, c, g, or t
  misc_feature (1295)..(1295): n is a, c, g, or t
  misc_feature (1302)..(1302): n is a, c, g, or t
  misc_feature (1305)..(1305): n is a, c, g, or t
  misc_feature (1314)..(1314): n is a, c, g, or t
  misc_feature (1327)..(1327): n is a, c, g, or t
  misc_feature (1331)..(1331): n is a, c, g, or t
  misc_feature (1339)..(1340): n is a, c, g, or t
  misc_feature (1343)..(1343): n is a, c, g, or t
  misc_feature (1358)..(1358): n is a, c, g, or t
  misc_feature (1362)..(1362): n is a, c, g, or t
  misc_feature (1369)..(1369): n is a, c, g, or t
agagagattactatgagaggatcgcatcaccatcaccatcacggatcctatttaggtgacactatagaatcgtcgacccacgcgtccgaacttatgaacaccctaaggaaattgagacgtcagatggacatcattgtgtctgaagtttctatgatcagagatattcgagagagggagattcggatctatacagatgcaggccgtatttgtagaccacttctgattgtggaaaaacaaaagctacttttgaagaagaggcatattgaccaattgaaagagagagaatataacaactatagttggcaggatcttgtggccagtggggtagtggagtatattgataccctggaagaagaaacagtgatgcttgcaatgactccagatgatttacaggagaaagaagtagcttattgttccacatatacacactgtgagattcatccctcaatgatccttggtgtctgtgcatctattattccctttcctgatcataaccagtcccctagaaacacataccagtctgctatgggtaagcaggctatgggagtttacatcaccaacttccatgttcgcatggacacattggcccatgttctctattatcctcaaaagccacttgtgactacacggtctatggaatatctacgatttagagagctgccagcaggcatcaactcaattgtggccattgcatcatacactggatataatcaggaagactctgttatcatgaatcgttcagctgtagaccgcggcttcttcaggtctgttttctatcgctcatacaaagaacaggagtctaaaaaaggatttgatcaagaagaagtttttgagaagcctacacgtgaancatgccagggcatgaggcatgccatttacgacaagctggaatgatgatggtttgatagctccaggggtncgtgtatcaggagatgatgttattatagncaaaacagtccccttgcctgaaantgaaatgaattggananccccnatagacncttnncnagagagactggagcncttttcccaaactagcgaacggncntggggnatcnggntatgggaacccnccanccggaagnanaaaattttgnaaaanangggaccccnggttagattccccanatggnaaaaanttngctatnccactggncaaagggtctgggggatncnnaaaaaaaaanaaaggcctnccccngggagnnnnccccggaaaattaaaaccccngncccccccccggnaaaatnggnccctattgagcccccngggagnaccccaaaggnaantgggngcccccnttnggggggtgnggggaaatttctntttntgtggtcnnccnaaaaggggggggggngggngaaaacnaaatttg

SEQ ID NO: 363 - DNA, 1088 bp, Homo Sapiens
  misc_feature (2)..(7): n is a, c, g, or t
  misc_feature (873)..(873): n is a, c, g, or t
  misc_feature (906)..(906): n is a, c, g, or t
  misc_feature (927)..(927): n is a, c, g, or t
  misc_feature (940)..(940): n is a, c, g, or t
  misc_feature (943)..(943): n is a, c, g, or t
  misc_feature (996)..(996): n is a, c, g, or t
  misc_feature (1009)..(1009): n is a, c, g, or t
  misc_feature (1011)..(1011): n is a, c, g, or t
  misc_feature (1027)..(1027): n is a, c, g, or t
  misc_feature (1033)..(1033): n is a, c, g, or t
  misc_feature (1055)..(1055): n is a, c, g, or t
  misc_feature (1065)..(1065): n is a, c, g, or t
  misc_feature (1067)..(1068): n is a, c, g, or t
  misc_feature (1072)..(1075): n is a, c, g, or t
  misc_feature (1080)..(1083): n is a, c, g, or t
  misc_feature (1085)..(1087): n is a, c, g, or t
annnnnngaattagagaaattactatgagaggatcgcatcaccatcaccatcacggatcctatttaggtgacactatagaatcgtcgacccacgcgtccgccgcggcggtgaacggggcggcaggcttctcgagctccgggcccgcggcaacctcgggcgctgttctgcaggccgcgaccggcatgtacgagcaactcaagggcgagtggaaccgtaaaagccccaatcttagcaagtgcggggaagagctgggtcgactcaagctagttcttctggagctcaacttcttgccaaccacagggaccaagctgaccaaacagcagctaattctggcccgtgacatactggagatcggggcccaatggagcatcctacgcaaggacatcccctccttcgagcgctacatggcccagctcaaatgctactactttgattacaaggagcagctccccgagtcagcctatatgcaccagctcttgggcctcaacctcctcttcctgctgtcccagaaccgggtggctgagttccacacggagttggagcggctgcctgccaaggacatacagaccaatgtctacatcaagcacccagtgtccctggagcaatacctgatggagggcagctacaacaaagtgttcctggccaagggtaacatccccgccgagagctacaccttcttcattgacatcctgctcgacactatcagggatgagatcgctgggtgcatcgagaaggcctacgagaaaatccttttcactgaggccacccggatcctcttcttcaacacacccaaaaagatgacagactacgccaagaagcgagggtgggtcctgggccccaacaactactacagttttgccagccagcagcanaagccggaagacaccaccatttcccctccacanaactggccaaaaaggtcatcnaagtatgcccggncanctggaaaatgatcgtctgaacccccccgggcactgggtggggcagggcacganttatttaaaaaantnaacctgcagggtttcncccaanaaagggggactgacattccccncaaaaaaaanannaaannnnaaaannnnannna

SEQ ID NO: 364 - DNA, 1139 bp, Homo Sapiens
  misc_feature (4)..(4): n is a, c, g, or t
  misc_feature (6)..(12): n is a, c, g, or t
  misc_feature (829)..(829): n is a, c, g, or t
  misc_feature (832)..(832): n is a, c, g, or t
  misc_feature (835)..(835): n is a, c, g, or t
  misc_feature (872)..(872): n is a, c, g, or t
  misc_feature (881)..(881): n is a, c, g, or t
  misc_feature (888)..(888): n is a, c, g, or t
  misc_feature (893)..(893): n is a, c, g, or t
  misc_feature (896)..(896): n is a, c, g, or t
  misc_feature (921)..(921): n is a, c, g, or t
  misc_feature (925)..(925): n is a, c, g, or t
  misc_feature (948)..(948): n is a, c, g, or t
  misc_feature (953)..(953): n is a, c, g, or t
  misc_feature (960)..(960): n is a, c, g, or t
  misc_feature (966)..(966): n is a, c, g, or t
  misc_feature (975)..(975): n is a, c, g, or t
  misc_feature (979)..(979): n is a, c, g, or t
  misc_feature (985)..(985): n is a, c, g, or t
  misc_feature (1007)..(1007): n is a, c, g, or t
  misc_feature (1016)..(1016): n is a, c, g, or t
  misc_feature (1020)..(1020): n is a, c, g, or t
  misc_feature (1024)..(1024): n is a, c, g, or t
  misc_feature (1030)..(1030): n is a, c, g, or t
  misc_feature (1034)..(1034): n is a, c, g, or t
  misc_feature (1050)..(1050): n is a, c, g, or t
  misc_feature (1071)..(1071): n is a, c, g, or t
  misc_feature (1075)..(1075): n is a, c, g, or t
  misc_feature (1078)..(1078): n is a, c, g, or t
  misc_feature (1081)..(1081): n is a, c, g, or t
  misc_feature (1085)..(1085): n is a, c, g, or t
  misc_feature (1088)..(1088): n is a, c, g, or t
  misc_feature (1094)..(1094): n is a, c, g, or t
  misc_feature (1097)..(1097): n is a, c, g, or t
  misc_feature (1118)..(1118): n is a, c, g, or t
  misc_feature (1121)..(1121): n is a, c, g, or t
  misc_feature (1123)..(1123): n is a, c, g, or t
  misc_feature (1130)..(1130): n is a, c, g, or t
  misc_feature (1134)..(1134): n is a, c, g, or t
cttntnnnnnnnaatagagaaattactatgagaggatcgcatcaccatcaccatcacggatcctatttaggtgacactatagaatcgtcgacccacgcgtccgggaagctcctggatgatcccagcaaacagaagcggaagttctcttctttcttcaagagtttggtcatcgagctggacaaagatctttatggccctgacaaccacctcgttgagtggcatcggacacccacgacccaggagacggacggcttccaggtgaaacggcctggggacctgagtgtgcgctgcacgctgctcctcatgctggactaccagcctccccagttcaaactggatccccgcctagcccggctgctggggctgcacacacagagccgctcagccattgtccaggccctgtggcagtatgtgaagaccaacaggctgcaggactcccatgacaaggaatacatcaatggggacaagtatttccagcagattcctgagtagcagaagcagtacacagtcatggtcttggagccaagagaccgaccaggattctagttcaggccctactgtggattagctctgtgctgcagccaatccatgttagcccccccaagttaggaagacctggaaaccctacaaagccaaccgctttctggaatgtaatattcttggcacttggagttaggatccccaggttctagtcctgagtctggactctggatttttgattgtccccggctgaagttttctgagattccccagcgcctcacagccctgctattgccccctgacccaattgtcatcaaccatgtcatcagcgtggaccctttcaaaccanaanaanacggcgtgctatgacattgacgtggaggtggaagganccattaaanggggcanatgancancttcctcctatccacggccaaccancagnaaatcagtgctctggacagtaanatccntgaaacnattgantccataaanccanctcaanatccaaaggacttcatgctaancttctccanaaancccnaagggntatntccaaaacctgctccnctcccaaaaccgggaacctcnaggnganganaaangtnacccgncanccctgaaaaagaaccccgggnttnanttttacnccancccct

SEQ ID NO: 365 - DNA, 1128 bp, Homo Sapiens
  misc_feature (841)..(841): n is a, c, g, or t
  misc_feature (844)..(844): n is a, c, g, or t
  misc_feature (865)..(865): n is a, c, g, or t
  misc_feature (889)..(889): n is a, c, g, or t
  misc_feature (926)..(926): n is a, c, g, or t
  misc_feature (955)..(955): n is a, c, g, or t
  misc_feature (960)..(960): n is a, c, g, or t
  misc_feature (962)..(962): n is a, c, g, or t
  misc_feature (972)..(972): n is a, c, g, or t
  misc_feature (1007)..(1007): n is a, c, g, or t
  misc_feature (1021)..(1021): n is a, c, g, or t
  misc_feature (1024)..(1024): n is a, c, g, or t
  misc_feature (1027)..(1027): n is a, c, g, or t
  misc_feature (1033)..(1033): n is a, c, g, or t
  misc_feature (1035)..(1035): n is a, c, g, or t
  misc_feature (1055)..(1055): n is a, c, g, or t
  misc_feature (1066)..(1066): n is a, c, g, or t
  misc_feature (1077)..(1077): n is a, c, g, or t
  misc_feature (1081)..(1081): n is a, c, g, or t
  misc_feature (1084)..(1084): n is a, c, g, or t
  misc_feature (1087)..(1087): n is a, c, g, or t
  misc_feature (1091)..(1092): n is a, c, g, or t
  misc_feature (1094)..(1094): n is a, c, g, or t
  misc_feature (1101)..(1102): n is a, c, g, or t
  misc_feature (1110)..(1111): n is a, c, g, or t
  misc_feature (1116)..(1116): n is a, c, g, or t
  misc_feature (1120)..(1120): n is a, c, g, or t
tagagaaattactatgagaggatcgcatcaccatcaccatcacggatcctatttaggtgacactatagaatcgtcgacccacgcgtccggcgtcggctgcggcgggtgtgggaggtggcgacggccggggccggggtcctgcccggctgcggaggcgggcgcgacgggcgcgggggtcgctgctcctgaggcgatgatgggcaaggaagaggagattgcgcggatcgcccggaggctggacaagatggtgaccaagaagagcgcggagggagccatggatttgctgcgggagctgaaggccatgcctatcacgctgcacctgctccagtccacccgagtcgggatgtctgtcaacgcccttcggaagcagagctcggatgaggaggtcattgcactggccaagtctctcatcaagtcctggaagaagctcctggatgcttccgatgccaaagccagggagcgggggaggggcatgcctctgcccacgtcctcgagggatgcctcagaggccccggatcccagccgcaagaggccggagctgcccagggcaccgtcgactccgaggatcaccacatttcctccggtgcctgtcacctgtgatgccgtgcgcaacaagtgccgcgagatgctgaccgctgccctgcagacggaccatgaccacgtggccatcggtgcggactgcgagcgcctgtcggctcagatcgaggaatgcatcttccgggacgttggaaacacagacatgaagtataagaaccgtgtacggagtcgtatctccaacctgaaggatgccaagaaccctgacctgcggcggaatgtgctgtgtggggccataacaccccancanatcgctgtgatgacctcaaangaaatggccagtgatgaactgaangaaatccgtaaggccatgaccaaggaggccatccganagcaccaaatggcccgcactggcggcacncaaananactgttcacntgcggcaagtgcaggaaaaaaaactgcacctaacncaggtgcaaacccncanctnttaaanancccatgaccacctttttttntctgcaacaantgtggaaaccnctgnaanttntgcnnanccctccnntaaatttnntgaancttnggccctcc

SEQ ID NO: 366 - DNA, 1355 bp, Homo Sapiens
  misc_feature (883)..(883): n is a, c, g, or t
  misc_feature (918)..(918): n is a, c, g, or t
  misc_feature (925)..(925): n is a, c, g, or t
  misc_feature (945)..(945): n is a, c, g, or t
  misc_feature (977)..(977): n is a, c, g, or t
  misc_feature (993)..(993): n is a, c, g, or t
  misc_feature (1001)..(1001): n is a, c, g, or t
  misc_feature (1023)..(1023): n is a, c, g, or t
  misc_feature (1032)..(1032): n is a, c, g, or t
  misc_feature (1034)..(1034): n is a, c, g, or t
  misc_feature (1047)..(1047): n is a, c, g, or t
  misc_feature (1052)..(1052): n is a, c, g, or t
  misc_feature (1056)..(1057): n is a, c, g, or t
  misc_feature (1062)..(1062): n is a, c, g, or t
  misc_feature (1071)..(1071): n is a, c, g, or t
  misc_feature (1081)..(1081): n is a, c, g, or t
  misc_feature (1083)..(1083): n is a, c, g, or t
  misc_feature (1111)..(1111): n is a, c, g, or t
  misc_feature (1116)..(1116): n is a, c, g, or t
  misc_feature (1121)..(1121): n is a, c, g, or t
  misc_feature (1124)..(1124): n is a, c, g, or t
  misc_feature (1137)..(1137): n is a, c, g, or t
  misc_feature (1154)..(1154): n is a, c, g, or t
  misc_feature (1157)..(1157): n is a, c, g, or t
  misc_feature (1161)..(1161): n is a, c, g, or t
  misc_feature (1204)..(1204): n is a, c, g, or t
  misc_feature (1211)..(1211): n is a, c, g, or t
  misc_feature (1215)..(1215): n is a, c, g, or t
  misc_feature (1218)..(1218): n is a, c, g, or t
  misc_feature (1231)..(1231): n is a, c, g, or t
  misc_feature (1238)..(1238): n is a, c, g, or t
  misc_feature (1242)..(1242): n is a, c, g, or t
  misc_feature (1247)..(1247): n is a, c, g, or t
  misc_feature (1257)..(1257): n is a, c, g, or t
  misc_feature (1266)..(1266): n is a, c, g, or t
  misc_feature (1269)..(1270): n is a, c, g, or t
  misc_feature (1284)..(1284): n is a, c, g, or t
  misc_feature (1299)..(1299): n is a, c, g, or t
  misc_feature (1301)..(1301): n is a, c, g, or t
  misc_feature (1304)..(1304): n is a, c, g, or t
  misc_feature (1306)..(1306): n is a, c, g, or t
  misc_feature (1313)..(1315): n is a, c, g, or t
  misc_feature (1317)..(1317): n is a, c, g, or t
  misc_feature (1325)..(1326): n is a, c, g, or t
  misc_feature (1331)..(1331): n is a, c, g, or t
  misc_feature (1347)..(1347): n is a, c, g, or t
  misc_feature (1351)..(1351): n is a, c, g, or t
tagagaaattactatgagaggatcgcatcaccatcaccatcacggatcctatttaggtgacactatagaatcgtcgacccacgcgtccgccagctctgggtacccggctctgcatcgcgtcgccatgatgggccatcgtccagtgctcgtgctcagccagaacacaaagcgtgaatccggaagaaaagttcaatctggaaacatcaatgctgccaagactattgcagatatcatccgaacatgtttgggacccaagtccatgatgaagatgcttttggacccaatgggaggcattgtgatgaccaatgatggcaatgccattcttcgagagattcaagtccagcatccagcggccaagtccatgatcgaaattagccggacccaggatgaagaggttggagatgggaccacatcagtaattattcttgcaggggaaatgctgtctgtagctgagcacttcctggagcagcagatgcacccaacagtggtgatcagtgcttaccgcaaggcattggatgatatgatcagcaccctaaagaaaataagtatcccagtcgacatcagtgacagtgatatgatgctgaacatcatcaacagctctattactaccaaagccatcagtcggtggtcatctttggcttgcaacattgccctggatgctgtcaagatggtacagtttgaggagaatggtcggaaagagattgacataaaaaaatatgcaagagtggaaaagatacctggaggcatcattgaagactcctgtgtcttgcgtggagtcatgattaacaaggatgtgacccatccacgtatgcggcgctatatcaagaaccctcgcattgtgctgctggattcttctctggaatacaagaaaaggagaaagccngactgacattgagattacccgagaggaggacttcncccgaanttctccagatggaggaagantacatccagcagctctgtgaggacattatccnactgaagcccgatgtnggtcatcnctgaaaagggcatctcaaattnacttcaccncnaccttatgcgggnccaanatcnnagccntccccaaantccggaaaananaaaaataatcccattgcttaaaacccgnggggncccgnaantccccccaccaangaactgaaaaaaaaaanttngaanaagaccaggccttttgaaatcaaaaaattggaaaaaaactttnttttttncctnganggaaaaaccccanggcctgncccnttccnccggggggtnaaaaaaaanttnncccaaaaaaaaccnccccccaaacccttnanggntncaagttnnngnaccccccnnggccngggggggcccccaaanggtngccc

SEQ ID NO: 367 - DNA, 752 bp, Homo Sapiens
  misc_feature (584)..(584): n is a, c, g, or t
  misc_feature (608)..(608): n is a, c, g, or t
  misc_feature (622)..(622): n is a, c, g, or t
  misc_feature (639)..(639): n is a, c, g, or t
  misc_feature (649)..(649): n is a, c, g, or t
  misc_feature (677)..(677): n is a, c, g, or t
  misc_feature (680)..(680): n is a, c, g, or t
  misc_feature (703)..(704): n is a, c, g, or t
  misc_feature (708)..(708): n is a, c, g, or t
  misc_feature (710)..(710): n is a, c, g, or t
  misc_feature (718)..(718): n is a, c, g, or t
  misc_feature (720)..(720): n is a, c, g, or t
  misc_feature (723)..(723): n is a, c, g, or t
  misc_feature (730)..(730): n is a, c, g, or t
  misc_feature (739)..(741): n is a, c, g, or t
  misc_feature (745)..(750): n is a, c, g, or t
tagagaaattactatgagaggatcgcatcaccatcaccatcacggatcctatttaggtgacactatagaatcgtcgacccacgcgtccggcctcgagtttggaagaaaacaaggcagtagtaaggaggaacaggaaaggaagaggctgatccacaaacacaagcgtgaatttaaaggggccgttcgagaaatccgcaaggacaatcagttcctggcgaggatgcaactctcagaaatcatggaacgggatgcggaaagaaagcggaaagtaaagcagctttttaacagcctggctacacaggaaggcgaatggaaggctctgaagaggaaaaagttcaaaaaataaattacattttataaataaggcaaggaactggacattacctcacatctgcaattccaaccctctgggaggccaaggcaggaggattgcttcagcccgggagttcgagaccagcctgggcaacacaggaagaccccgtctctaccagaaaaacataaaaattagccaagtgtggtggcacgcacctgtggtcccaactactcgggaggctgaagcaggaggactgcttgagctgagtccnaggttacagtgagccgtgattganccactgcactccancctcggccacagtgcangactgtgtcncttaaaaaaaaatttttttttttttganacngaatttttgctcttgttgcccannctgnantgcactgncncanccttccncctccctgnnnttcnnnnnnat

SEQ ID NO: 368 - DNA, 1196 bp, Homo Sapiens
  misc_feature (857)..(857): n is a, c, g, or t
  misc_feature (880)..(880): n is a, c, g, or t
  misc_feature (901)..(901): n is a, c, g, or t
  misc_feature (935)..(935): n is a, c, g, or t
  misc_feature (989)..(989): n is a, c, g, or t
  misc_feature (994)..(994): n is a, c, g, or t
  misc_feature (1012)..(1012): n is a, c, g, or t
  misc_feature (1031)..(1031): n is a, c, g, or t
  misc_feature (1042)..(1042): n is a, c, g, or t
  misc_feature (1053)..(1053): n is a, c, g, or t
  misc_feature (1062)..(1062): n is a, c, g, or t
  misc_feature (1074)..(1074): n is a, c, g, or t
  misc_feature (1077)..(1077): n is a, c, g, or t
  misc_feature (1088)..(1088): n is a, c, g, or t
  misc_feature (1092)..(1092): n is a, c, g, or t
  misc_feature (1106)..(1106): n is a, c, g, or t
  misc_feature (1116)..(1116): n is a, c, g, or t
  misc_feature (1123)..(1123): n is a, c, g, or t
  misc_feature (1131)..(1131): n is a, c, g, or t
  misc_feature (1141)..(1141): n is a, c, g, or t
  misc_feature (1149)..(1150): n is a, c, g, or t
  misc_feature (1154)..(1154): n is a, c, g, or t
  misc_feature (1166)..(1167): n is a, c, g, or t
  misc_feature (1171)..(1171): n is a, c, g, or t
  misc_feature (1173)..(1173): n is a, c, g, or t
  misc_feature (1178)..(1178): n is a, c, g, or t
  misc_feature (1181)..(1181): n is a, c, g, or t
  misc_feature (1184)..(1184): n is a, c, g, or t
  misc_feature (1189)..(1189): n is a, c, g, or t
  misc_feature (1192)..(1192): n is a, c, g, or t
tagagaaattactatgagaggatcgcatcaccatcaccatcacggatcctatttaggtgacactatagaatcgtcgacccacgcgtccgcccacgcgtccgggcaaggattacatgctggccatcattctggtcaactgcgatggtgtgcacggaggggcccggtgggaagaccaggagctgagggaggacgagggaatccgaaaggctactctggggctcaaagacggtgggggatacctctctgtgtagggaccagggggcgaatgaacccggtctttacatgtgatgtcttcaagattgaggagcctggatcttcagcctaagaactgacccattttggggatggagaggggattatgacagcatgttattctgaactcacaaatcatatgctccctcctctctaatccggtgttcctgtagatgacttgtggggggaccacagtctggaggtggaggctggcctgcctcctggctggaggaagatccacgatgctgcaggtacttactactggcatgtacccagcggtagcacccagtggcagcgcccaacctgggaactaggagatgcagaggacccaggcacgggaacggaggggatctggggactgcggccccccaaagggagatccttctccagcctggagagttcactggaccggagtaactctctgtcctggtatggtggggaatcctacatccagagcatggagccaggggctaagtgctttgcagtccgctctctgggctgggtagaggtacctgaagaggacctggcaccggggaagagcagtattgcagtcaataactgtatccagcagctggcccagacccgcagccggagccagcctccanatggtgcctggggtgagggccanaacatgctgatgatcctgaanaaggatgccatgagcctagtgaatcccctggacnacagtctgatcactgccagcctctggtgcacatccgtgtgtggggcgtgggganctccnagggccgtgacaggtgantgaaaccaggtatcctgancccatcctgangtccctactcntcctgctantccctacctganttncagcctcctgnaggntcctgctttaacanttttacccanccctttntgccctgntaggaatttntttttggnnaggnaaaaaaaacttnngccnanggccnggnttnccttnaanccct

SEQ ID NO: 369 - DNA, 1175 bp, Homo Sapiens
  misc_feature (836)..(836): n is a, c, g, or t
  misc_feature (880)..(880): n is a, c, g, or t
  misc_feature (894)..(894): n is a, c, g, or t
  misc_feature (900)..(900): n is a, c, g, or t
  misc_feature (907)..(907): n is a, c, g, or t
  misc_feature (956)..(956): n is a, c, g, or t
  misc_feature (1014)..(1014): n is a, c, g, or t
  misc_feature (1021)..(1021): n is a, c, g, or t
  misc_feature (1028)..(1028): n is a, c, g, or t
  misc_feature (1041)..(1041): n is a, c, g, or t
  misc_feature (1049)..(1049): n is a, c, g, or t
  misc_feature (1059)..(1059): n is a, c, g, or t
  misc_feature (1068)..(1068): n is a, c, g, or t
  misc_feature (1077)..(1077): n is a, c, g, or t
  misc_feature (1083)..(1083): n is a, c, g, or t
  misc_feature (1093)..(1093): n is a, c, g, or t
  misc_feature (1098)..(1098): n is a, c, g, or t
  misc_feature (1107)..(1107): n is a, c, g, or t
  misc_feature (1118)..(1118): n is a, c, g, or t
  misc_feature (1120)..(1120): n is a, c, g, or t
  misc_feature (1123)..(1123): n is a, c, g, or t
  misc_feature (1131)..(1131): n is a, c, g, or t
  misc_feature (1143)..(1143): n is a, c, g, or t
  misc_feature (1156)..(1156): n is a, c, g, or t
  misc_feature (1169)..(1169): n is a, c, g, or t
  misc_feature (1173)..(1173): n is a, c, g, or t
agagaaattactatgagaggatcgcatcaccatcaccatcacggatcctatttaggtgacactatagaatcgtcgacccacgcgtccggggacggcggccgggagggcgcggcccgggttcccgttccccgcggagccatgcggtacaacgagaaggagctgcaggctctgtcccggcagccggccgagatggcggccgagctgggcatgaggggccccaagaagggcagcgacgaggccgagcccgtcggagccctgctgctggagcgctgcagagtcgtccgggaagagcccggcaccttctccatcagcttcattgaggaccctgagaggaagtatcactttgagtgcagcagcgaggagcagtgtcaggagtggatggaggctctgcgtcgggccagctacgagttcatgcggagaagcctcatcttctacaggaacgaaatccggaaggtgacgggcaaggaccccctggaacagttcggcatatccgaggaggccaggttccagctgagtggcttgcaggcgtgagcgcagggcacggtggtcagcgtgcagcgggacgggactggccctgcccagccatgaatcgcttggccatgcctggatctgttttgttttggtttttggtttttgggtcagggtttcactgtgttgcccaggctagagtgcagtggtgccacagctcactgtgaccttgaccttctggactcaagtgatcctcctgcctcagcttcccaagtagcggggatcacaggcatgagccgccacacccggccatcacacctggattttcagtgggaggtttttggtttggagacatccaaagcctgaanccaggtgggtgtgggcaggggctgcattttatgaaactgcccancaagctgcgctccntggggnccccagnatccacctaactggcctggcacctggtgccacgtgctgctgccgccagnatatgcgccttcccacaggtgccctgcctgaattgtgtgcatccaggggcctggtgancccccanggctggnggcatggcccccntgccccgngctgaatgantgtacaaanccaaaaaancttttnaatggcctanggctnaatcccccnccacctttaantnttntgcaaaangaaggcccttgnttttcccttgggnaaatgttttcctngggncc

SEQ ID NO: 370 - DNA, 1167 bp, Homo Sapiens
  misc_feature (842)..(842): n is a, c, g, or t
  misc_feature (980)..(980): n is a, c, g, or t
  misc_feature (983)..(983): n is a, c, g, or t
  misc_feature (1013)..(1013): n is a, c, g, or t
  misc_feature (1022)..(1022): n is a, c, g, or t
  misc_feature (1036)..(1036): n is a, c, g, or t
  misc_feature (1039)..(1039): n is a, c, g, or t
  misc_feature (1046)..(1046): n is a, c, g, or t
  misc_feature (1050)..(1050): n is a, c, g, or t
  misc_feature (1053)..(1053): n is a, c, g, or t
  misc_feature (1057)..(1058): n is a, c, g, or t
  misc_feature (1064)..(1064): n is a, c, g, or t
  misc_feature (1072)..(1072): n is a, c, g, or t
  misc_feature (1076)..(1076): n is a, c, g, or t
  misc_feature (1082)..(1082): n is a, c, g, or t
  misc_feature (1086)..(1086): n is a, c, g, or t
  misc_feature (1090)..(1090): n is a, c, g, or t
  misc_feature (1099)..(1099): n is a, c, g, or t
  misc_feature (1102)..(1102): n is a, c, g, or t
  misc_feature (1110)..(1110): n is a, c, g, or t
  misc_feature (1116)..(1116): n is a, c, g, or t
  misc_feature (1136)..(1136): n is a, c, g, or t
  misc_feature (1146)..(1146): n is a, c, g, or t
  misc_feature (1156)..(1157): n is a, c, g, or t
  misc_feature (1160)..(1160): n is a, c, g, or t
  misc_feature (1164)..(1164): n is a, c, g, or t
tagagaaattactatgagaggatcgcatcaccatcaccatcacggatcctatttaggtgacactatagaatcgtcgacccacgcgtccgcggtctttctatggagcatgaggtcctacacgttaattcggaagctagagggccatcaaagcagtgttgtctcttgtgacttctcccccgactctgccctgcttgtcacggcttcttacgataccaatgtgattatgtgggacccctacaccggcgaaaggctgaggtcactccaccacacccaggttgaccccgccatggatgacagtgacgtccacattagctcactgagatctgtgtgcttctctccagaaggcttgtaccttgccacggtggcagatgacagactcctcaggatctgggccctggaactgaaaactcccattgcatttgctcctatgaccaatgggctttgctgcacattttttccacatggtggagtcattgccacagggacaagagatggccacgtccagttctggacagctcctagggtcctgtcctcactgaagcacttatgccggaaagcccttcgaagtttcctaacaacttaccaagtcctagcactgccaatccccaagaaaatgaaagagttcctcacatacaggactttttaagcaacaccacatcttgtgcttctttgtagcagggtaaatcgtcctgtcaaagggagttgctggaataatgggccaaacatctggtcttgcattgaaatagcatttctttgggattgtgaatagaatgtagcaaaaccagattccagtgtactagtcatggatctttctctccctggcatgtgaaagtcagtcttanaggaagagattccacttgcacggcaacagagccttacgttaaaattttcagtccagttatgaacagcaagtgttgaactctttctgcttgttttgattcaaagtgcagttactgatgttgttttgatatgcaactaantangcctccaaagcctctctagtggcaaaacanctcaaactncccccgctgggaanganggcttcngccnaanaccnnccttgngttctgangcangggaancatnggtncaagttccnccngctggggncaaaantgctccaaggtggccaaggntttttttttngggctccttnnganctgnagg

SEQ ID NO: 371 - DNA, 1175 bp, Homo Sapiens
  misc_feature (9)..(9): n is a, c, g, or t
  misc_feature (924)..(924): n is a, c, g, or t
  misc_feature (945)..(945): n is a, c, g, or t
  misc_feature (948)..(948): n is a, c, g, or t
  misc_feature (951)..(951): n is a, c, g, or t
  misc_feature (1011)..(1011): n is a, c, g, or t
  misc_feature (1022)..(1022): n is a, c, g, or t
  misc_feature (1028)..(1028): n is a, c, g, or t
  misc_feature (1040)..(1040): n is a, c, g, or t
  misc_feature (1054)..(1054): n is a, c, g, or t
  misc_feature (1062)..(1062): n is a, c, g, or t
  misc_feature (1064)..(1064): n is a, c, g, or t
  misc_feature (1068)..(1068): n is a, c, g, or t
  misc_feature (1071)..(1071): n is a, c, g, or t
  misc_feature (1086)..(1087): n is a, c, g, or t
  misc_feature (1089)..(1089): n is a, c, g, or t
  misc_feature (1095)..(1095): n is a, c, g, or t
  misc_feature (1100)..(1100): n is a, c, g, or t
  misc_feature (1105)..(1106): n is a, c, g, or t
  misc_feature (1112)..(1112): n is a, c, g, or t
  misc_feature (1117)..(1117): n is a, c, g, or t
  misc_feature (1138)..(1138): n is a, c, g, or t
  misc_feature (1141)..(1141): n is a, c, g, or t
  misc_feature (1144)..(1145): n is a, c, g, or t
  misc_feature (1166)..(1166): n is a, c, g, or t
  misc_feature (1171)..(1171): n is a, c, g, or t
attagaganattactatgagaggatcgcatcaccatcaccatcacggatcctatttaggtgacactatagaatcgtcgacccacgcgtccggagaggccgcggcggcaggtccacctgggcttgcgaaggcacagattccccgtccacagctcacgaccagatgcaccagcaggagtccacatcgaggacgtcctccgggcactcccacgaccagtgaccaggagttaaactttgggatgtgcccgtgatgttggaccacaaggacttagaggccgaaatccaccccttgaaaaatgaagaaagaaaatcgcaggaaaatctgggaaatccatcaaaaaatgaggataacgtgaaaagcgcgcctccacagtcccggctctcccggtgccgagcggcggcgttttttctttcattgtttctctgcctttttgtggtgttcgtcgtctcattcgtcatcccgtgtccagaccggccggcgtcacagcgaatgtggaggatagactacagtgccgctgttatctatgactttctggctgtggatgatataaacggggacaggatccaagatgttctttttctttataaaaacaccaacagcagcaacaatttcagccgatcctgtgtggacgaaggcttttcctctccctgcacctttgcagctgctgtgtcgggggccaacggcagcacgctctgggagagacctgtggcccaagacgtggccctcgtggagtgtgctgtgccccagccaagaggcagtgaggcaccttctgcctgcatcctggtgggcagacccagttctttcattgcagtcaacttgttcacaggggaaaccctgtggaaccacagcagcagcttcagcgggaatgcgtccatcctgagccctctgctgcaggtgcctgatgtggacggcgatggggccccanacctgctggttctcacccagnacnggnagaggttagtggccacctctactccggcagcaccgggcaccaaattggcctcaaaggcanccttggtgtgnacgggnaaagtggcttcntccttcacgtcacnagaaaggngnccantanatcctttttcctggnnangctccntttgnggttnntttggnaaggntcttacaaaaagggaaccggnaanggnngcccctttaaaaatgaccccnctggnaaaa

SEQ ID NO: 372 - DNA, 1179 bp, Homo Sapiens
  misc_feature (871)..(871): n is a, c, g, or t
  misc_feature (880)..(880): n is a, c, g, or t
  misc_feature (895)..(895): n is a, c, g, or t
  misc_feature (943)..(943): n is a, c, g, or t
  misc_feature (953)..(953): n is a, c, g, or t
  misc_feature (979)..(979): n is a, c, g, or t
  misc_feature (986)..(986): n is a, c, g, or t
  misc_feature (1011)..(1011): n is a, c, g, or t
  misc_feature (1023)..(1023): n is a, c, g, or t
  misc_feature (1035)..(1035): n is a, c, g, or t
  misc_feature (1042)..(1042): n is a, c, g, or t
  misc_feature (1056)..(1056): n is a, c, g, or t
  misc_feature (1072)..(1072): n is a, c, g, or t
  misc_feature (1079)..(1079): n is a, c, g, or t
  misc_feature (1087)..(1087): n is a, c, g, or t
  misc_feature (1089)..(1091): n is a, c, g, or t
  misc_feature (1099)..(1099): n is a, c, g, or t
  misc_feature (1101)..(1101): n is a, c, g, or t
  misc_feature (1110)..(1110): n is a, c, g, or t
  misc_feature (1132)..(1132): n is a, c, g, or t
  misc_feature (1134)..(1134): n is a, c, g, or t
  misc_feature (1144)..(1144): n is a, c, g, or t
  misc_feature (1147)..(1147): n is a, c, g, or t
  misc_feature (1149)..(1149): n is a, c, g, or t
  misc_feature (1153)..(1153): n is a, c, g, or t
  misc_feature (1167)..(1167): n is a, c, g, or t
  misc_feature (1174)..(1175): n is a, c, g, or t
tagagaaattactatgagaggatcgcatcaccatcaccatcacggatcctatttaggtgacactatagaatcgtcgacccacgcgtccgcccacgcgtccggtccatggcggcgcttgacctgcgagcggagctggattcgctggtcctgcagctgcttggggacctggaggagctggaggggaaacgaacggtgttgaacgcccgggtggaggagggctggctctcgctcgccaaggctcgctacgcgatgggcgccaagtcggtagggcccctgcagtatgcttcccacatggagccccaggtctgcctccacgccagcgaggcccaggagggactccagaagttcaaggtggtgagagctggtgtccacgccccagaggaggtggggcctcgcgaagcaggtctgcggaggcgcaagggccccactaagaccccagaaccggagtcctctgaggcccctcaggaccccctgaactggtttggaatcctagttcctcacagtctacgtcaggctcaagcaagcttccgggatggcctgcagctggccgcagacatagccagcctccagaaccgcattgactggggtcgaagccagctccggggactccaagagaaactcaagcagctggagcctggggctgcctgacatgcgcgcaaagaggcagggcagcgagcacagctgttctccgacatggctacgtgatctcaggccttcttccttcacaattagctcttgcccctaccccacgccagctaatgccccttctgtgtccctgctctgcatgtttccattttccttaggtgtgaagtttgaagaggcaaacagtaattttgaaagccactactttgaaaccattctaaggcctganttcccatangacacactcacatangcaggtacacgttagtcaacaattggaactgcctcttggatcactcanctgtgctttncatggctggatgatgaacactgtgcnaaaaaanatgggggccaagaaaataacgcttncatgcttaatanatcctccaaatngtctttngctggagaaaaaancgtactccccccaaanatcgganaatatgantnnnttcccaangnaaacaaaancctgaataactgggcacccttngnagggtttaanccngnaaanaaaaatgattttgncctaaannttta

SEQ ID NO: 373 - DNA, 953 bp, Homo Sapiens
  misc_feature (873)..(873): n is a, c, g, or t
  misc_feature (920)..(920): n is a, c, g, or t
  misc_feature (931)..(953): n is a, c, g, or t
tagagaaattactatgagaggatcgcatcaccatcaccatcacggatcctatttaggtgacactatagaatcgtcgacccacgcgtccgggaagatggctgccgcctgggggtcgtccctaacggccgcgacgcagagagcggtcactccctggccgaggggcaggctcctcacggcctccctgggaccccaggcgcgtcgggaggcgtcgtcctccagccccgaggccggcgaagggcagatccgcctcacagacagttgcgtccagaggcttttggaaatcaccgaagggtcagaattcctcaggctgcaagtggagggaggtggatgctccggattccaatacaaattttcactggatacagttatcaaccccgacgacagggtatttgaacagggtggggcaagagtggtggttgactctgatagcttggccttcgtgaaaggggcccaggtggacttcagccaagaactgatccgaagctcatttcaagtgttgaacaatcctcaagcacagcaaggctgctcctgtgggtcatctttctctatcaaactttgatgtgatgactggtgactctgggattgtcaccagttgtaccaatttgaagaacctggaattagtagaattctagaagtttacttctaatcatgtccctctcaattttatttcccgcagtccaggagtgttatgttttgccactattattttcagaatgtgaagattttactcttggcttaatttttccctccactcagtgctaaggctgagcctccagatgctgttacctcagatttaatcactggttgaaactccgtataatctgtagagcctccatggctctaaaatttggaattaacttctcttgccttaanagctgcttgtacatatgtggatagctatgtataaaagcttcattttnaagagaaaaannnnnnnnnnnnnnnnnnnnnnn

SEQ ID NO: 374 - DNA, 1179 bp, Homo Sapiens
  misc_feature (912)..(912): n is a, c, g, or t
  misc_feature (946)..(946): n is a, c, g, or t
  misc_feature (957)..(957): n is a, c, g, or t
  misc_feature (970)..(970): n is a, c, g, or t
  misc_feature (983)..(983): n is a, c, g, or t
  misc_feature (994)..(994): n is a, c, g, or t
  misc_feature (1027)..(1027): n is a, c, g, or t
  misc_feature (1038)..(1038): n is a, c, g, or t
  misc_feature (1048)..(1048): n is a, c, g, or t
  misc_feature (1051)..(1051): n is a, c, g, or t
  misc_feature (1060)..(1060): n is a, c, g, or t
  misc_feature (1080)..(1080): n is a, c, g, or t
  misc_feature (1111)..(1111): n is a, c, g, or t
  misc_feature (1119)..(1120): n is a, c, g, or t
  misc_feature (1143)..(1143): n is a, c, g, or t
  misc_feature (1145)..(1145): n is a, c, g, or t
  misc_feature (1150)..(1150): n is a, c, g, or t
  misc_feature (1152)..(1153): n is a, c, g, or t
  misc_feature (1160)..(1160): n is a, c, g, or t
  misc_feature (1162)..(1162): n is a, c, g, or t
  misc_feature (1166)..(1166): n is a, c, g, or t
  misc_feature (1179)..(1179): n is a, c, g, or t
gagagaattactatgagaggatcgcatcaccatcaccatcacggatcctatttaggtgacactatagaatcgtcgacccacgcgtccggccatgggggacacatcatgcctcccacacaatcgcagtttggagagatgggaggcaagtttatgaaaagccaggggctaagccagctctaccataaccagagtcagggactcttatcccagctgcaaggacagtcgaaggatatgccacctcggttttctaagaaaggacagcttaatgcagatgagattagcctgaggcctgctcagtcgttcctaatgaataaaaatcaagtgccaaagcttcagccccagataactatgattcctcctagtgcacaaccaccacgcactcaaacaccacctctgggacagacacctcagcttggtctcaaaactaatccaccacttatccaggaaaagcctgccaagaccagcaaaaagccaccaccgtcaaaggaagaactccttaaactaactgaaactgttgtgactgaatatctaaatagtggaaatgcaaatgaggctgtcaatggtgtaagagaaatgagggctcctaaacactttcttcctgagatgttaagcaaagtaatcatcctgtcactagatagaagcgatgaagataaagaaaaagcaagttctttgatcagtttactcaaacaggaagggatagccacaagtgacaacttcatgcaggctttcctgaatgtattggaccagtgtcccaaactggaggttgacatccctttggtgaaatcctatttagcacagtttgcagctcgtgccatcatttcagagctggtgagcatttcagaactagctcaaccactagaaagtggcacccattttcctctcttcctactttgtcttcagcagttagctaanttacaagatcgagaatggttaacagaactttttncaacaaagcanggtcaatatgcanaaatgctccccanaaattgatcanaataaggaccgcatgttggaaattttggaaggnaagggactgantttcttattnccnctcctcaanttggaaaagaactggtgaancaaataaagttggatccctcccccccaaccntatttaannggattaaaaaaaactcccccccnancttcngnnaaaaaangnattngggaaattcttan

SEQ ID NO: 375 - DNA, 932 bp, Homo Sapiens
  misc_feature (646)..(646): n is a, c, g, or t
  misc_feature (708)..(708): n is a, c, g, or t
  misc_feature (724)..(724): n is a, c, g, or t
  misc_feature (730)..(730): n is a, c, g, or t
  misc_feature (764)..(764): n is a, c, g, or t
  misc_feature (784)..(784): n is a, c, g, or t
  misc_feature (790)..(790): n is a, c, g, or t
  misc_feature (833)..(833): n is a, c, g, or t
  misc_feature (843)..(843): n is a, c, g, or t
  misc_feature (847)..(847): n is a, c, g, or t
  misc_feature (866)..(866): n is a, c, g, or t
  misc_feature (872)..(872): n is a, c, g, or t
  misc_feature (878)..(878): n is a, c, g, or t
  misc_feature (881)..(881): n is a, c, g, or t
  misc_feature (884)..(885): n is a, c, g, or t
  misc_feature (891)..(891): n is a, c, g, or t
  misc_feature (893)..(893): n is a, c, g, or t
  misc_feature (897)..(897): n is a, c, g, or t
  misc_feature (905)..(905): n is a, c, g, or t
  misc_feature (909)..(909): n is a, c, g, or t
  misc_feature (912)..(912): n is a, c, g, or t
  misc_feature (917)..(917): n is a, c, g, or t
  misc_feature (919)..(919): n is a, c, g, or t
  misc_feature (927)..(927): n is a, c, g, or t
agaaattactatgagaggatcgcatcaccatcaccatcacggatcctatttaggtgacactatagaatcgtcgacccacgcgtccgctgtgccggagtctcctccctttggtccgctgcaggcccgcagcccgagtgtcgccgccatggcttcgccgcagctctgccgcgcgctggtgtcggcgcaatgggtggcggaggcgctgcgggccccgcgcgctgggcagcctctgcagctgctggacgcctcctggtacctgccgaagctggggcgcgacgcgcgacgcgagttcgaggagcgccacatcccgggcgccgctttcttcgacatcgaccagtgcagcgaccgcacctcgccctacgaccacatgctgcccggggccgagcatttcgcggagtacgcaggccgcctgggcgtgggcgcggccacccacgtcgtgatctacgacgccagcgaccagggcctctactccgccccgcgcgtctggtggatgttccgcgccttcggccaccacgccgtgtcactgcttgatggcggcctccgccactggctgcgccagaacctcccgctcagctccggcaagagccaacctgctcccgccgagttccgcgctcagctcgaccccgccttcatcaagacctacgangacatcaaggagaacctggaatcccggcgcttccaggtggtggactcccgagccactggcangttccgcggcaccgancccganccccgaaacggcattgaacctggccacatcccangtaccgtgaacatccccttnacaaantttctgaaccagaagggctggaaaaaaaccctgaagaaattcnccatttgttncaanaaaaaaaaatggaactgtntaaacnactggnggncanntgtggntntggngtcaaaanctgncangtggnantaaggggnctaac

SEQ ID NO: 376 - DNA, 1077 bp, Homo Sapiens
  misc_feature (1)..(2): n is a, c, g, or t
  misc_feature (5)..(5): n is a, c, g, or t
  misc_feature (821)..(821): n is a, c, g, or t
  misc_feature (893)..(893): n is a, c, g, or t
  misc_feature (916)..(916): n is a, c, g, or t
  misc_feature (922)..(922): n is a, c, g, or t
  misc_feature (955)..(955): n is a, c, g, or t
  misc_feature (962)..(962): n is a, c, g, or t
  misc_feature (964)..(964): n is a, c, g, or t
  misc_feature (968)..(968): n is a, c, g, or t
  misc_feature (970)..(970): n is a, c, g, or t
  misc_feature (983)..(983): n is a, c, g, or t
  misc_feature (987)..(987): n is a, c, g, or t
  misc_feature (991)..(991): n is a, c, g, or t
  misc_feature (993)..(993): n is a, c, g, or t
  misc_feature (1005)..(1005): n is a, c, g, or t
  misc_feature (1007)..(1007): n is a, c, g, or t
  misc_feature (1016)..(1017): n is a, c, g, or t
  misc_feature (1022)..(1023): n is a, c, g, or t
  misc_feature (1025)..(1025): n is a, c, g, or t
  misc_feature (1027)..(1027): n is a, c, g, or t
  misc_feature (1032)..(1033): n is a, c, g, or t
  misc_feature (1036)..(1036): n is a, c, g, or t
  misc_feature (1040)..(1041): n is a, c, g, or t
  misc_feature (1052)..(1052): n is a, c, g, or t
  misc_feature (1057)..(1057): n is a, c, g, or t
  misc_feature (1062)..(1062): n is a, c, g, or t
nnatngagaaattactatgagaggatcgcatcaccatcaccatcacggatcctatttaggtgacactatagaatcgtcgacccacgcgtccggtcctgtcaatgtcacgttctgccattactgcaatagccacatctgtgtgtcacggcccaccctgtcgccagcttcatcatgccctcatgcctcatgggaaaggtggacgttcctcagtcagtgggattgtggccactgtgtttggagcaacaggattcctggggcgatatgttgtcaaccaccttggacgcatggggtcacaggtaatcataccctatcggtgtgataaatatgacatcatgcaccttcgtcccatgggtgacctgggccagcttctgtttctggaatgggacgcgagagataaagattctatccgacgagtagtacaacacagcaatgtggtcatcaatcttattggacgagactgggaaaccaaaaactttgattttgaggatgtttttgtgaagattccccaagcaattgctcaactgtccaaggaagctggagttgaaaaattcattcatgtttcacatctgaatgcgaatattaaaagctcttctagatatttgagaaataaggctgttggagagaaagtagtgagagatgcatttccggaagccattatcgtaaagccgtcggacatctttggaagagaggatagattccttaattcttttgcaagtatgcatcggtttggtcctataccccttggttccttgggctggaagacagttaaacaaccagtatatgtcgtaaatgtatccaaaggaattgttaatgcagttaangatcctgatgccaatgggaaatcctttgctttcgttggtcccagtcggtacctccttttccacctggtgaantacatctttgctgtggctcacanattgtncctcccattcccctggccgctttttgcctatcnatggggnancaanantctttgaaataancccntttnancccctggaaaanangggaaaaannggaanngnangcccnnccnaaanntgaaattgccnccccngcccnggcttaaaaaaacct

SEQ ID NO: 377 - DNA, 921 bp, Homo Sapiens
  misc_feature (813)..(813): n is a, c, g, or t
  misc_feature (825)..(825): n is a, c, g, or t
  misc_feature (827)..(827): n is a, c, g, or t
  misc_feature (854)..(854): n is a, c, g, or t
  misc_feature (887)..(887): n is a, c, g, or t
tagagaaattactatgagaggatcgcatcaccatcaccatcacggatcctatttaggtgacactatagaatcgtcgacccacgcgtccgccctggatagcctgaatactcacctcttcctgcagggacccaagatcgcagaggagtttgaggtggagctggagcggggcaagacgctgcacatcaaagccctggccgtgagcgacctgaaccgggccggccagaggcaggtcttctttgagctcaatgggcagctgcggtccatcttggtcaaggacacccaggccatgaaggagatgcacttccaccccaaggccctaaaggacgtgaagggccagatcggggcgcccatgcctgggaaggtgatagacatcaaagtggtggcaggggccaaggtggccaagggccagcccctgtgtgtgctcagtgccatgaagatggagactgtggtgacctcacccatggagggtactgtccgcaaggttcatgtgaccaaggacatgacactggaaggtgacgacctcatcctggagatcgagtgatcttgccccagaccggcagcctggccatccccaagccttcaacagaagctgtgctgccacggcaggcccaggccagccagtgcccgaggccaggaaggccgggccgtggaggtcctgtccacagctggacaggagagacaccgcctgcggtggttcattcctttcagccatcgtcctttcctccggcggacagctgcttacatgttcatctcttgccaaataagggtcccctcctcactggaaactacaagtggtgggtcaggtggtcctangacccaggggangnttaaggggtcctatctcctgggggaanggggaaatctaaaatgtcccaggtcctgggaantttactcaataaagctggctttcccctgccctcc

SEQ ID NO: 378 - DNA, 1234 bp, Homo Sapiens
  misc_feature (743)..(743): n is a, c, g, or t
  misc_feature (750)..(750): n is a, c, g, or t
  misc_feature (775)..(775): n is a, c, g, or t
  misc_feature (807)..(807): n is a, c, g, or t
  misc_feature (810)..(810): n is a, c, g, or t
  misc_feature (828)..(828): n is a, c, g, or t
  misc_feature (831)..(831): n is a, c, g, or t
  misc_feature (834)..(834): n is a, c, g, or t
  misc_feature (854)..(854): n is a, c, g, or t
  misc_feature (870)..(870): n is a, c, g, or t
  misc_feature (874)..(874): n is a, c, g, or t
  misc_feature (904)..(904): n is a, c, g, or t
  misc_feature (930)..(930): n is a, c, g, or t
  misc_feature (933)..(933): n is a, c, g, or t
  misc_feature (937)..(937): n is a, c, g, or t
  misc_feature (946)..(946): n is a, c, g, or t
  misc_feature (956)..(956): n is a, c, g, or t
  misc_feature (963)..(963): n is a, c, g, or t
  misc_feature (968)..(968): n is a, c, g, or t
  misc_feature (970)..(970): n is a, c, g, or t
  misc_feature (972)..(972): n is a, c, g, or t
  misc_feature (991)..(991): n is a, c, g, or t
  misc_feature (1014)..(1014): n is a, c, g, or t
  misc_feature (1017)..(1017): n is a, c, g, or t
  misc_feature (1023)..(1023): n is a, c, g, or t
  misc_feature (1034)..(1034): n is a, c, g, or t
  misc_feature (1038)..(1038): n is a, c, g, or t
  misc_feature (1044)..(1044): n is a, c, g, or t
  misc_feature (1066)..(1066): n is a, c, g, or t
  misc_feature (1070)..(1070): n is a, c, g, or t
  misc_feature (1074)..(1075): n is a, c, g, or t
  misc_feature (1082)..(1083): n is a, c, g, or t
  misc_feature (1087)..(1087): n is a, c, g, or t
  misc_feature (1098)..(1099): n is a, c, g, or t
  misc_feature (1105)..(1105): n is a, c, g, or t
  misc_feature (1117)..(1117): n is a, c, g, or t
  misc_feature (1131)..(1131): n is a, c, g, or t
  misc_feature (1146)..(1146): n is a, c, g, or t
  misc_feature (1155)..(1155): n is a, c, g, or t
  misc_feature (1158)..(1159): n is a, c, g, or t
  misc_feature (1166)..(1167): n is a, c, g, or t
  misc_feature (1169)..(1169): n is a, c, g, or t
  misc_feature (1177)..(1177): n is a, c, g, or t
  misc_feature (1184)..(1184): n is a, c, g, or t
  misc_feature (1214)..(1214): n is a, c, g, or t
  misc_feature (1219)..(1219): n is a, c, g, or t
gagaaattactatgagaggatcgcatcaccatcaccatcacggatcctatttaggtgacactatagaatcgtcgacccacgcgtccgcggacgcgtgggcgcaaaatcatgctgccgtgttccgtgtgggaagcttgttgcaagaaggttgtgggaaaatcagcaagctctatggagacctgaagcatctgaagacgtttgactggggaatggtctggaacacggacctggtggagaccctggagctgcagaacctggtgctgtgtgcgctgcagaccgtcaatggagcagaggcgcagaaggagtcacggggcgcgcacgccggggaagactacaaggtgcggattgatgagtacgatcactccaagcccatccaggggcaacagaagaagccctttgaggagtactggaggaagcacaccctgtcctatgtggacgtcggcactgggaaggtcactgtggaatatagacccataatcgacaaaactttgaacgaggctgactgtgccaccgtccccccagccattcgctcctactgatgagacaagatgcggtgatgacagaatcagctttttgcacagccagagaacaacacatcacacacaagaaacagttgtgctcatgtgatgggggcctcagcgctaggaaggagtggactgttggcgcacgcagcagcttgaataaatctgaaagtcactacgctgcgtaagagaagccaaataaagcgcatgctgtgtacaganggtgtcnagaatgcctcctacgtgacgggaancaaatccgtggttccctgcaaactggcaggancanattccaaggcacaggaanaanctngcaggtaaaatgtgttcatnaccttctgcccatttnaccncaaaaaagctgggaaaaaaaatgctaaccnaaaaaaaaggtgaaagtaaataaaanttntcanctgggtgantgggtaaacntgcaggnttgcngncntgctttttttaaaaaactngggggtaaaaggactctcatacntcnttgggnaatgcaaaacnttcncccccntggaaaaagatttggcaccttntaanaaannaaatggnntttncccttaaaccnncaattntaaaatccgccncaaaaaaatttggnaaaaaaaaaaaggantttttcccnaannttttttnncnccccgaanggttttntccccaaaatttttcttggggggttttttnaaaangaaaaaaaaaaaatt

SEQ ID NO: 379 - DNA, 1151 bp, Homo Sapiens
  misc_feature (28)..(28): n is a, c, g, or t
  misc_feature (819)..(819): n is a, c, g, or t
  misc_feature (841)..(841): n is a, c, g, or t
  misc_feature (847)..(847): n is a, c, g, or t
  misc_feature (854)..(854): n is a, c, g, or t
  misc_feature (857)..(857): n is a, c, g, or t
  misc_feature (876)..(876): n is a, c, g, or t
  misc_feature (921)..(921): n is a, c, g, or t
  misc_feature (923)..(923): n is a, c, g, or t
  misc_feature (951)..(951): n is a, c, g, or t
  misc_feature (953)..(953): n is a, c, g, or t
  misc_feature (956)..(956): n is a, c, g, or t
  misc_feature (966)..(966): n is a, c, g, or t
  misc_feature (970)..(970): n is a, c, g, or t
  misc_feature (992)..(992): n is a, c, g, or t
  misc_feature (999)..(999): n is a, c, g, or t
  misc_feature (1018)..(1018): n is a, c, g, or t
  misc_feature (1025)..(1025): n is a, c, g, or t
  misc_feature (1029)..(1029): n is a, c, g, or t
  misc_feature (1049)..(1049): n is a, c, g, or t
  misc_feature (1054)..(1054): n is a, c, g, or t
  misc_feature (1060)..(1060): n is a, c, g, or t
  misc_feature (1064)..(1064): n is a, c, g, or t
  misc_feature (1069)..(1069): n is a, c, g, or t
  misc_feature (1079)..(1080): n is a, c, g, or t
  misc_feature (1088)..(1088): n is a, c, g, or t
  misc_feature (1094)..(1094): n is a, c, g, or t
  misc_feature (1097)..(1097): n is a, c, g, or t
  misc_feature (1099)..(1099): n is a, c, g, or t
  misc_feature (1101)..(1101): n is a, c, g, or t
  misc_feature (1104)..(1104): n is a, c, g, or t
  misc_feature (1107)..(1108): n is a, c, g, or t
  misc_feature (1111)..(1112): n is a, c, g, or t
  misc_feature (1116)..(1116): n is a, c, g, or t
  misc_feature (1120)..(1120): n is a, c, g, or t
  misc_feature (1127)..(1127): n is a, c, g, or t
  misc_feature (1131)..(1131): n is a, c, g, or t
  misc_feature (1136)..(1136): n is a, c, g, or t
  misc_feature (1144)..(1144): n is a, c, g, or t
  misc_feature (1147)..(1147): n is a, c, g, or t
caataaagatattaactatgagaggatngcatcaccatcaccatcacgggatcctatttaggtgacactatagaatcgtcgacccacgcgtccggagctgcgcctgacggtggcaccatgagcagctcaggtggggcgcccggggcgtccgccagctctgcgccgcccgcgcaggaagagggcatgacgtggtggtaccgctggctgtgtcgcctgtctggggtgctgggggcagtctcttgcgcgatctctggcctcttcaactgcatcaccatccaccctctgaacatcgcggccggcgtgtggatgatcatgaatgccttcatcttgttgctgtgtgaggcgcccttctgctgccagttcatcgagtttgcaaacacagtggcggagaaggtggaccggctgcgctcctggcagaaggctgtcttctactgcgggatggcggtcgttcccatcgtcatcagcctgaccctgaccacgctgctgggcaacgccatcgcctttgctacgggggtgctgtacggactctctgctctgggcaaaaagggcgatgcgatctcctatgccaggatccagcagcagaggcagcaggcggatgaggagaagctcgcggagaccctggagggggagctgtgaagggctgggcgcccctccctccctgtcccctcttctggctctgtgtgggtccaagtgaggcctggactgtccacgctgaggcacagcctggagaggggcctttgcacgtgtccctacacctggagtcctctgctcctttctccagactggcttaagccaggagccactggctgctggtgtganggtctgggctgctggacttgangcaaancctgcancanctgtgtggacactacccanccctactcctctgctgggtgggtctgcaaatctcacaccaaaaananggctgcctgtgacctgctgtgacctggnancancttcccctgnaaangctggtcctggcttgaagggangggcaantggaacctgccacttgggnactgaanaaangaactccccaactttttaanagggnaacccnaggnctggnaaacctgccnntgcaaaanctccantgntncnaanggnnaannccantgtnacctgcntttnaaaanccaaaggntcnaaag

SEQ ID NO: 380 - DNA, 679 bp, Homo Sapiens
  misc_feature (2)..(2): n is a, c, g, or t
  misc_feature (302)..(302): n is a, c, g, or t
  misc_feature (310)..(310): n is a, c, g, or t
  misc_feature (365)..(365): n is a, c, g, or t
  misc_feature (399)..(399): n is a, c, g, or t
  misc_feature (405)..(405): n is a, c, g, or t
  misc_feature (443)..(443): n is a, c, g, or t
  misc_feature (518)..(518): n is a, c, g, or t
  misc_feature (527)..(527): n is a, c, g, or t
  misc_feature (535)..(535): n is a, c, g, or t
  misc_feature (547)..(547): n is a, c, g, or t
  misc_feature (550)..(550): n is a, c, g, or t
  misc_feature (558)..(558): n is a, c, g, or t
  misc_feature (578)..(578): n is a, c, g, or t
  misc_feature (581)..(581): n is a, c, g, or t
  misc_feature (583)..(583): n is a, c, g, or t
  misc_feature (605)..(605): n is a, c, g, or t
  misc_feature (612)..(612): n is a, c, g, or t
  misc_feature (618)..(618): n is a, c, g, or t
  misc_feature (623)..(623): n is a, c, g, or t
  misc_feature (629)..(630): n is a, c, g, or t
  misc_feature (632)..(632): n is a, c, g, or t
  misc_feature (637)..(637): n is a, c, g, or t
  misc_feature (641)..(641): n is a, c, g, or t
  misc_feature (645)..(645): n is a, c, g, or t
  misc_feature (650)..(650): n is a, c, g, or t
  misc_feature (652)..(652): n is a, c, g, or t
  misc_feature (655)..(655): n is a, c, g, or t
anattagaggagaattaactatgagaggatcgcatcaccatcaccatcacgggatcctatttaggatgacactatagaatcgtcgacccacgcgtccgggcggctgcagctccggtcgagccgcgcgcgctgcgaccccgctccgcagcccgctagtcgcccccgacccagcccagggccccggcgtggcccccgacccggcccccgcacccgccccgccgccgaccctatggagctgctggccgctgccttcagcgccgcctgcgccgtggaccacgacagttccacctcggaaagcgacncgcgcgantcggcggcgggacacctgcccggcagtgagtcgtcctccaccccgggaaatgggnccacgcccgaggagtggccggccctggccgacanccccancacgctcaccgaggccctgcggatgatccaccccattnccgccgactcctggagaaacctcattgaacaaataaggctcctgtatcaggaataccgagataaatcgactctcnaagaaatcnaaatcagngaggcaacaggntgnagaaatanaagacaataccaatgggtcnccngncagtgaggacaccccggaggangaatatnaagagnaggangaggannanccggncatnccancaaanangancactctgccccaaatctgcctgct

SEQ ID NO: 381 - DNA, 902 bp, Homo Sapiens
  misc_feature (1)..(1): n is a, c, g, or t
  misc_feature (680)..(680): n is a, c, g, or t
  misc_feature (709)..(709): n is a, c, g, or t
  misc_feature (730)..(730): n is a, c, g, or t
  misc_feature (732)..(732): n is a, c, g, or t
  misc_feature (737)..(737): n is a, c, g, or t
  misc_feature (751)..(751): n is a, c, g, or t
  misc_feature (756)..(756): n is a, c, g, or t
  misc_feature (773)..(773): n is a, c, g, or t
  misc_feature (792)..(792): n is a, c, g, or t
  misc_feature (800)..(800): n is a, c, g, or t
  misc_feature (803)..(804): n is a, c, g, or t
  misc_feature (815)..(816): n is a, c, g, or t
  misc_feature (821)..(821): n is a, c, g, or t
  misc_feature (832)..(834): n is a, c, g, or t
  misc_feature (839)..(839): n is a, c, g, or t
  misc_feature (843)..(843): n is a, c, g, or t
  misc_feature (848)..(848): n is a, c, g, or t
  misc_feature (851)..(852): n is a, c, g, or t
  misc_feature (857)..(857): n is a, c, g, or t
  misc_feature (861)..(861): n is a, c, g, or t
  misc_feature (872)..(872): n is a, c, g, or t
  misc_feature (883)..(883): n is a, c, g, or t
  misc_feature (887)..(887): n is a, c, g, or t
  misc_feature (895)..(895): n is a, c, g, or t
  misc_feature (898)..(898): n is a, c, g, or t
ntatagagaaattactatgagaggatcgcatcaccatcaccatcacggatcctatttaggtgacactatagaatcgtcgacccacgcgtccggtgccatggagacccagtctgagccctctgagttagaactggacgatgtcgttatcaccaacccccacattgaggccattctggagaatgaagactggatcgaagatgcctcgggtctcatgtcccactgcattgccatcttgaagatttgtcacactctgacagagaagcttgttgccatgacaatgggctctggggccaagatgaagacttcagccagtgtcagcgacatcattgtggtggccaagcggatcagccccagggtggatgatgttgtgaagtcgatgtaccctccgttggaccccaaactcctggacgcacggacgactgccctgctcctgtctgtcagtcacctggtgctggtgacaaggaatgcctgccatctgacgggaggcctggactggattgaccagtctctgtcggctgctgaggagcatttggaagtccttcgagaagcagccctagcttctgagccagataaaggcctcccaggccctgaaggcttcctgcaggagcagtctgcaatttagtgcctacaggccagcagctagccatgaaggcccctgccgccatccctggatggctcancttaaccttctactttttcctataaagtnagttgttctccacggctggananttcanctgtgtgtgcatantaaancaggaaatccccgtcantttatgcctctttttgcanttgcaaantgnngcttggtgaannggcantctaatactannntttangggnaaaanccnnttccnctcngcaaaaagaanattgaaaaacngggnggaactgncancttt

SEQ ID NO: 382 - DNA, 976 bp, Homo Sapiens
  misc_feature (280)..(280): n is a, c, g, or t
  misc_feature (433)..(433): n is a, c, g, or t
  misc_feature (435)..(435): n is a, c, g, or t
  misc_feature (472)..(472): n is a, c, g, or t
  misc_feature (486)..(486): n is a, c, g, or t
  misc_feature (511)..(511): n is a, c, g, or t
  misc_feature (548)..(548): n is a, c, g, or t
  misc_feature (597)..(597): n is a, c, g, or t
  misc_feature (655)..(655): n is a, c, g, or t
  misc_feature (658)..(658): n is a, c, g, or t
  misc_feature (665)..(665): n is a, c, g, or t
  misc_feature (667)..(667): n is a, c, g, or t
  misc_feature (674)..(674): n is a, c, g, or t
  misc_feature (685)..(685): n is a, c, g, or t
  misc_feature (687)..(687): n is a, c, g, or t
  misc_feature (694)..(694): n is a, c, g, or t
  misc_feature (709)..(709): n is a, c, g, or t
  misc_feature (715)..(715): n is a, c, g, or t
  misc_feature (734)..(734): n is a, c, g, or t
  misc_feature (749)..(749): n is a, c, g, or t
  misc_feature (753)..(753): n is a, c, g, or t
  misc_feature (764)..(764): n is a, c, g, or t
  misc_feature (771)..(771): n is a, c, g, or t
  misc_feature (781)..(781): n is a, c, g, or t
  misc_feature (791)..(791): n is a, c, g, or t
  misc_feature (802)..(802): n is a, c, g, or t
  misc_feature (810)..(810): n is a, c, g, or t
  misc_feature (812)..(812): n is a, c, g, or t
  misc_feature (818)..(818): n is a, c, g, or t
  misc_feature (821)..(821): n is a, c, g, or t
  misc_feature (839)..(840): n is a, c, g, or t
  misc_feature (844)..(845): n is a, c, g, or t
  misc_feature (858)..(858): n is a, c, g, or t
  misc_feature (861)..(861): n is a, c, g, or t
  misc_feature (864)..(864): n is a, c, g, or t
  misc_feature (868)..(868): n is a, c, g, or t
  misc_feature (871)..(871): n is a, c, g, or t
  misc_feature (877)..(877): n is a, c, g, or t
  misc_feature (884)..(884): n is a, c, g, or t
  misc_feature (887)..(887): n is a, c, g, or t
  misc_feature (908)..(908): n is a, c, g, or t
  misc_feature (913)..(913): n is a, c, g, or t
  misc_feature (923)..(923): n is a, c, g, or t
  misc_feature (925)..(925): n is a, c, g, or t
  misc_feature (927)..(927): n is a, c, g, or t
  misc_feature (939)..(939): n is a, c, g, or t
  misc_feature (950)..(950): n is a, c, g, or t
  misc_feature (958)..(958): n is a, c, g, or t
  misc_feature (960)..(962): n is a, c, g, or t
  misc_feature (971)..(971): n is a, c, g, or t
tagagaaaattactatgagaggatcgcatcaccatcaccatcacgggatcctatttaggtgacactatagaatcgtcgacccacgcgtccgcgacccctccgccctggctgaagccaggggagctggagcgcagcgcgtccgctgcagctcatgacagagatagagatgtagataaacgagactcatctgttagtaaagatgacaaagaaagggaaagcgtcgagaagagacactccagccacccttcaccagcacctgtcctcccggtgaatgccctgngacatacccgcagctccactgaacagatccgggctcatctgaacactgaggctcgggagaaggacaaacccaaagagagggagagagaccactcggaatcccgcaaggacctggccgccgacgagcacaaggcgaaagagggccacctgcccnanaaggacgggcacggccacgaggggcgcgccgcgggcnaagaggccaagcanctggcccgggtgccgtctccctacntgcggaccccggtggtggagagtgccaggcccaacancacctcgagccgggaggccgagccgcgcaagggtgagccggcctacganaaccccaagatgagctccgaggtcaaggtgaaggaggagcggaaggaagaccatgacntgncttccanangccccgnaaacccaccgngnctcgganccgccgcctcccaantcctcntctagcgtgtacccggggnccctggcctcaatgncccntgaacggtggnggtgacnggcatttcancccatgaacngcattctccanccctggananggactngcntgatgacccctttctggnntatnnatcccccttcccnggncgnaaancgntttccngtaaccnttnttttcccctgggacccccttnccggnacccctttgnangnatcttttaccgnaatacttttanttttcccngnnnaaaaacccncttgg

SEQ ID NO: 383 - DNA, 1025 bp, Homo Sapiens
  misc_feature (731)..(731): n is a, c, g, or t
  misc_feature (782)..(782): n is a, c, g, or t
  misc_feature (804)..(804): n is a, c, g, or t
  misc_feature (816)..(816): n is a, c, g, or t
  misc_feature (824)..(824): n is a, c, g, or t
  misc_feature (862)..(862): n is a, c, g, or t
  misc_feature (876)..(876): n is a, c, g, or t
  misc_feature (881)..(881): n is a, c, g, or t
  misc_feature (883)..(883): n is a, c, g, or t
  misc_feature (891)..(891): n is a, c, g, or t
  misc_feature (896)..(896): n is a, c, g, or t
  misc_feature (913)..(913): n is a, c, g, or t
  misc_feature (927)..(927): n is a, c, g, or t
  misc_feature (936)..(936): n is a, c, g, or t
  misc_feature (946)..(946): n is a, c, g, or t
  misc_feature (957)..(958): n is a, c, g, or t
  misc_feature (967)..(967): n is a, c, g, or t
  misc_feature (971)..(971): n is a, c, g, or t
  misc_feature (979)..(979): n is a, c, g, or t
  misc_feature (984)..(985): n is a, c, g, or t
  misc_feature (987)..(987): n is a, c, g, or t
  misc_feature (992)..(992): n is a, c, g, or t
  misc_feature (995)..(995): n is a, c, g, or t
  misc_feature (999)..(999): n is a, c, g, or t
  misc_feature (1013)..(1013): n is a, c, g, or t
  misc_feature (1015)..(1015): n is a, c, g, or t
  misc_feature (1018)..(1018): n is a, c, g, or t
  misc_feature (1024)..(1025): n is a, c, g, or t
agaaattactatgagaggatcgcatcaccatcaccatcacggatcctatttaggtgacactatagaatcgtcgacccacgcgtccgggatgaggacggctgggagacgcgaggggaccgcaaggcccggaagcccctggtggagaagaagcggcgcgcgcggatcaacgagagcctgcaggagctgcggctgctgctggcgggcgccgaggtgcaggccaagctggagaacgccgaagtgctggagctgacggtgcggcgggtccagggtgtgctgcggggccgggcgcgcgagcgcgagcagctgcaggcggaagcgagcgagcgcttcgctgccggctacatccagtgcatgcacgaggtgcacacgttcgtgtccacgtgccaggccatcgacgctaccgtcgctgccgagctcctgaaccatctgctcgagtccatgccgctgcgtgagggcagcagcttccaggatctgctgggggacgccctggcggggccacctagagcccctggacggagtggctggcctgcggggggcgctccgggatccccaatacccagccccccgggtcctggggacgacctgtgctccgacctggaggaggcccctgaggctgaactgagtcaggctcctgctgaggggcccgacttggtgcccgcagccctgggcagcctgaccacagcccaaattgcccggagtgtctggaggccttggtgaccaatgccagccanagtcctgcgggggtgggcccggccctccctggatctcctccctcctcccangggttcaaatgtggtggggtanggccctggaaantctcccangtcttccctccctcctctgatggatggcttgcaggcancccctggtaaccancccantnaggcccanccccntttttaaaaaattttanggaccctgcaactntgaattggntgaaggaagnaactacggcannaagaaaaantttntaaaactnccacnntntcccnagnttanccacccaacctttnanaancccttnn

SEQ ID NO: 384 - DNA, 1127 bp, Homo Sapiens
  misc_feature (1)..(1): n is a, c, g, or t
  misc_feature (780)..(780): n is a, c, g, or t
  misc_feature (840)..(840): n is a, c, g, or t
  misc_feature (932)..(932): n is a, c, g, or t
  misc_feature (953)..(953): n is a, c, g, or t
  misc_feature (963)..(963): n is a, c, g, or t
  misc_feature (976)..(976): n is a, c, g, or t
  misc_feature (988)..(988): n is a, c, g, or t
  misc_feature (1010)..(1010): n is a, c, g, or t
  misc_feature (1028)..(1028): n is a, c, g, or t
  misc_feature (1051)..(1051): n is a, c, g, or t
  misc_feature (1056)..(1056): n is a, c, g, or t
  misc_feature (1061)..(1061): n is a, c, g, or t
  misc_feature (1065)..(1065): n is a, c, g, or t
  misc_feature (1069)..(1069): n is a, c, g, or t
  misc_feature (1073)..(1073): n is a, c, g, or t
  misc_feature (1080)..(1081): n is a, c, g, or t
  misc_feature (1089)..(1089): n is a, c, g, or t
  misc_feature (1091)..(1091): n is a, c, g, or t
  misc_feature (1093)..(1093): n is a, c, g, or t
  misc_feature (1097)..(1097): n is a, c, g, or t
  misc_feature (1104)..(1104): n is a, c, g, or t
  misc_feature (1106)..(1106): n is a, c, g, or t
  misc_feature (1110)..(1110): n is a, c, g, or t
  misc_feature (1115)..(1115): n is a, c, g, or t
  misc_feature (1117)..(1117): n is a, c, g, or t
naatagagaaattactatgagaggatcgcatcaccatcaccatcacggatcctatttaggtgacactatagaatcgtcgacccacgcgtccgcaagatggcgggaggggtgcgcccgctgcggggcctccgcgccttgtgtcgcgtgctgctcttcctctcgcagttctgcattctgtcgggcggtgaaagtactgaaatcccaccttatgtgatgaagtgtccgagcaatggtttgtgtagcaggcttcctgcagactgtatagactgcacaacaaatttctcctgtacctatgggaagcctgtcacttttgactgtgcagtgaaaccatctgttacctgtgttgatcaagacttcaaatcccaaaagaacttcatcattaacatgacttgcagattttgctggcagcttcctgaaacagattacgagtgtaccaactccaccagctgcatgacggtgtcctgtcctcggcagcgctaccctgccaactgcacggtgcgggaccacgtccactgcttgggtaaccgtacttttcccaaaatgctatattgcaattggactggaggctataagtggtctacggctctggctctaagcatcaccctcggtgggtttggagcagaccgtttctacctgggccagtggcgggaaggcctcggcaagctcttcagcttcggtggcctgggaatatggacgctgatagacgtcctgctcattggagttggctatgttggaccagcagatggctctttgtacatttagctgtggtgtgtgcttcanaaaggagcagggcttaaaaaaagcccttttgtccgtaggagttgatgtggtgtgagtganatatttctatgtttttaatgtacagcatctgtactttgtttgccttgataaaggtaaaataaatgaaacgctgaactatgctaatctggaanttgtttttatttgcctgaaanaaattttttnctgtgaaaaaatnaaacgtactaanccaggaaaatgaattaaacagngattgaaaatccattaantccaagactttggtttggattgnccaantcaantaantcanttgnatctccnnccaaatgnancngccntgaaaancnttcncctgnantgcagaaaag

SEQ ID NO: 385 - DNA, 1053 bp, Homo Sapiens
  misc_feature (812)..(812): n is a, c, g, or t
  misc_feature (818)..(818): n is a, c, g, or t
  misc_feature (827)..(827): n is a, c, g, or t
  misc_feature (848)..(848): n is a, c, g, or t
  misc_feature (879)..(879): n is a, c, g, or t
  misc_feature (914)..(914): n is a, c, g, or t
  misc_feature (920)..(920): n is a, c, g, or t
  misc_feature (929)..(929): n is a, c, g, or t
  misc_feature (937)..(937): n is a, c, g, or t
  misc_feature (944)..(944): n is a, c, g, or t
  misc_feature (948)..(948): n is a, c, g, or t
  misc_feature (971)..(971): n is a, c, g, or t
  misc_feature (976)..(976): n is a, c, g, or t
  misc_feature (987)..(987): n is a, c, g, or t
  misc_feature (991)..(991): n is a, c, g, or t
  misc_feature (993)..(993): n is a, c, g, or t
  misc_feature (995)..(995): n is a, c, g, or t
  misc_feature (998)..(1000): n is a, c, g, or t
  misc_feature (1002)..(1002): n is a, c, g, or t
  misc_feature (1009)..(1009): n is a, c, g, or t
  misc_feature (1013)..(1014): n is a, c, g, or t
  misc_feature (1017)..(1017): n is a, c, g, or t
  misc_feature (1031)..(1031): n is a, c, g, or t
  misc_feature (1034)..(1034): n is a, c, g, or t
  misc_feature (1041)..(1041): n is a, c, g, or t
  misc_feature (1051)..(1052): n is a, c, g, or t
gattagagagaattactatgagaggatcgcatcaccatcaccatcacggatcctatttaggtgacactatagaatcgtcgacccacgcgtccggcagcttggagctggagcccagaggccagcagcccgtggccaaggccgaggggagcccgaccgccatcctcatcggctgcctggtggccatcatcctgctcctgctgctcatcattgccctcatgctctggcggctgcactggcgcaggctcctcagcaaggctgaacggagggtgttggaagaggagctgacggttcacctctctgtccctggggacactatcctcatcaacaaccgcccaggtcctagagagccacccccgtaccaggagccccggcctcgtgggaatccgccccactccgctccctgtgtccccaatggctctgcctacagtggggactatatggagcctgagaagccaggcgccccgcttctgcccccacctccccagaacagcgtcccccattatgccgaggctgacattgttaccctgcagggcgtcaccgggggcaacacctatgctgtgcctgcactgcccccaggggcagtcggggatgggccccccagagtggatttccctcgatctcgactccgcttcaaggagaagcttggcgagggccagtttggggaggtgcacctgtgtgaggtcgacagccctcaagatctggtcagtcttgatttcccccttaatgtgcgtaagggacaccctttgctggtagctgtcaagatcttacggccagatgccaccaagaatgccaggaatgatttcctgaaagangtgaanatcatgtcnaggctcaaggaccccaacatnattcggctgctgggcgtgtgtgtgcaggacnaccccctctgcatgattactgactacatggaaaanggcganctcaaccanttcttcantgcccancaanctggaagaaaaaggcaacccaanggggncccctggggangggnangntgnnnangggcccnccannaantaacccaatggtgntgnatgtggnaaccaaattnnc

SEQ ID NO: 386 - DNA, 1263 bp, Homo Sapiens
  misc_feature (859)..(859): n is a, c, g, or t
  misc_feature (896)..(896): n is a, c, g, or t
  misc_feature (927)..(927): n is a, c, g, or t
  misc_feature (944)..(944): n is a, c, g, or t
  misc_feature (947)..(947): n is a, c, g, or t
  misc_feature (964)..(964): n is a, c, g, or t
  misc_feature (973)..(973): n is a, c, g, or t
  misc_feature (979)..(979): n is a, c, g, or t
  misc_feature (991)..(991): n is a, c, g, or t
  misc_feature (1006)..(1006): n is a, c, g, or t
  misc_feature (1016)..(1016): n is a, c, g, or t
  misc_feature (1034)..(1034): n is a, c, g, or t
  misc_feature (1041)..(1041): n is a, c, g, or t
  misc_feature (1043)..(1044): n is a, c, g, or t
  misc_feature (1050)..(1050): n is a, c, g, or t
  misc_feature (1055)..(1055): n is a, c, g, or t
  misc_feature (1062)..(1062): n is a, c, g, or t
  misc_feature (1065)..(1065): n is a, c, g, or t
  misc_feature (1095)..(1095): n is a, c, g, or t
  misc_feature (1103)..(1103): n is a, c, g, or t
  misc_feature (1105)..(1105): n is a, c, g, or t
  misc_feature (1126)..(1126): n is a, c, g, or t
  misc_feature (1132)..(1132): n is a, c, g, or t
  misc_feature (1134)..(1134): n is a, c, g, or t
  misc_feature (1142)..(1142): n is a, c, g, or t
  misc_feature (1151)..(1151): n is a, c, g, or t
  misc_feature (1174)..(1174): n is a, c, g, or t
  misc_feature (1180)..(1180): n is a, c, g, or t
  misc_feature (1183)..(1183): n is a, c, g, or t
  misc_feature (1199)..(1199): n is a, c, g, or t
  misc_feature (1205)..(1205): n is a, c, g, or t
  misc_feature (1213)..(1213): n is a, c, g, or t
  misc_feature (1219)..(1219): n is a, c, g, or t
  misc_feature (1225)..(1226): n is a, c, g, or t
  misc_feature (1229)..(1229): n is a, c, g, or t
  misc_feature (1235)..(1235): n is a, c, g, or t
  misc_feature (1237)..(1239): n is a, c, g, or t
  misc_feature (1258)..(1258): n is a, c, g, or t
  misc_feature (1263)..(1263): n is a, c, g, or t
gagaaattactatgagaggatcgcatcaccatcaccatcacggatcctatttaggtgacactatagaatcgtcgacccacgcgtccggtgactttgactgcgagttgaggctgttgattcatcagagtctagcaggaggaattattggggtcaaaggtgctaaaatcaaagaacttcgagagaacactcaaaccaccatcaagcttttccaggaatgctgtcctcattccactgacagagttgttcttattggaggaaaacccgatagggttgtagagtgcataaagatcatccttgatcttatatctgagtctcccatcaaaggacgtgcacagccttatgatcccaatttttacgatgaaacctatgattatggtggttttacaatgatgtttgatgaccgtcgcggacgcccagtgggatttcccatgcggggaagaggtggttttgacagaatgcctcctggtcggggtgggcgtcccatgcctccatctagaagagattatgatgatatgagccctcgtcgaggaccacctccccctcctcccggacgaggcggccggggtggtagcagagctcggaatcttcctcttcctccaccaccaccacctagagggggagacctcatggcctatgacagaagagggagacctggagaccgttacgacggcatggttggtttcagtgctgatgaaacttgggactctgcaatagatacatggagcccatcagaatggcagatggcttatgaaccacagggtggctccggatatgattattcctatgcagggggtcgtggctcatatggtgatcttggtggacctattattactacacaagtaactattcccaaagattnggctggatctattatttggcaaaggtggtcagcgganttaaacaaatccgtcatgagtcggggagctncgatcaaaattgatganccntttaaaaggatccgaanatcggatcnttaccnttacagggaacncaggaccagaatacngaatggcccngtttttgctgcaaaaaantgtgaancnntatgcnaaatnttgaagnatnctaatgcaaaaaattttttccttttttatngggggaancnaaattctggaaagttttttcnaaaaanantggaaaantgaagggancccgcccccttttttttttttanccgccnccnggttaaaaaaccaaanttcccncgccttcnaagggntcccgnnttngagggnannnaaaccttttcggttccccnaaagn

SEQ ID NO: 387 - DNA, 1275 bp, Homo Sapiens
  misc_feature (700)..(700): n is a, c, g, or t
  misc_feature (708)..(708): n is a, c, g, or t
  misc_feature (742)..(742): n is a, c, g, or t
  misc_feature (755)..(755): n is a, c, g, or t
  misc_feature (784)..(784): n is a, c, g, or t
  misc_feature (799)..(799): n is a, c, g, or t
  misc_feature (804)..(804): n is a, c, g, or t
  misc_feature (814)..(814): n is a, c, g, or t
  misc_feature (818)..(818): n is a, c, g, or t
  misc_feature (821)..(821): n is a, c, g, or t
  misc_feature (841)..(841): n is a, c, g, or t
  misc_feature (843)..(843): n is a, c, g, or t
  misc_feature (853)..(853): n is a, c, g, or t
  misc_feature (861)..(861): n is a, c, g, or t
  misc_feature (863)..(864): n is a, c, g, or t
  misc_feature (885)..(885): n is a, c, g, or t
  misc_feature (887)..(887): n is a, c, g, or t
  misc_feature (894)..(894): n is a, c, g, or t
  misc_feature (899)..(899): n is a, c, g, or t
  misc_feature (907)..(907): n is a, c, g, or t
  misc_feature (927)..(927): n is a, c, g, or t
  misc_feature (932)..(932): n is a, c, g, or t
  misc_feature (941)..(941): n is a, c, g, or t
  misc_feature (952)..(952): n is a, c, g, or t
  misc_feature (955)..(956): n is a, c, g, or t
  misc_feature (977)..(977): n is a, c, g, or t
  misc_feature (989)..(989): n is a, c, g, or t
  misc_feature (1018)..(1018): n is a, c, g, or t
  misc_feature (1040)..(1042): n is a, c, g, or t
  misc_feature (1062)..(1062): n is a, c, g, or t
  misc_feature (1067)..(1067): n is a, c, g, or t
  misc_feature (1078)..(1078): n is a, c, g, or t
  misc_feature (1087)..(1088): n is a, c, g, or t
  misc_feature (1091)..(1091): n is a, c, g, or t
  misc_feature (1093)..(1093): n is a, c, g, or t
  misc_feature (1098)..(1098): n is a, c, g, or t
  misc_feature (1103)..(1103): n is a, c, g, or t
  misc_feature (1112)..(1112): n is a, c, g, or t
  misc_feature (1127)..(1127): n is a, c, g, or t
  misc_feature (1129)..(1129): n is a, c, g, or t
  misc_feature (1137)..(1137): n is a, c, g, or t
  misc_feature (1154)..(1154): n is a, c, g, or t
  misc_feature (1157)..(1157): n is a, c, g, or t
  misc_feature (1159)..(1159): n is a, c, g, or t
  misc_feature (1168)..(1168): n is a, c, g, or t
  misc_feature (1188)..(1188): n is a, c, g, or t
  misc_feature (1190)..(1192): n is a, c, g, or t
  misc_feature (1208)..(1208): n is a, c, g, or t
  misc_feature (1232)..(1232): n is a, c, g, or t
  misc_feature (1242)..(1242): n is a, c, g, or t
  misc_feature (1252)..(1254): n is a, c, g, or t
  misc_feature (1259)..(1260): n is a, c, g, or t
gagaaaattactatgagaggatcgcatcaccatcaccatcacggatcctatttaggtgacactatagaatcgtcgacccacgcgtccgcccacgcgtccgcccacgcgtccgcagaaatcataattcagaaggacaaggcgattgtggcccacaacagacatggcaacaaggctgtgtactcagtcatggccatggtggagcacagtggcaactacacgtgcaaagtggagtccagccgcatatccaaggtcagcagcatcgtggtcaacataacagaactattttccaagcccgaactggaatcttccttcacacatctggaccaaggtgaaagactgaacctgtcctgctccatcccaggagcacctccagccaacttcaccatccagaaggaagatacgattgtgtcacagactcaagatttcaccaagatagcctcaaagtcggacagtgggacgtatatctgcactgcaggtattgacaaagtggtcaagaaaagcaacacagtccagatagtcgtatgtgaaatgctctcccagcccaggatttcttatgatgcccagtttgaggtcataaaaggacagaccatcgaagtccgttgcgaatcgatcagtggaactttgcctatttcttaccaacttttaaaaacaagtaaagttttggagaatagtaccaagaactcaatgatcctgcggtatncaagacanccccctgaagacgtcgaataccagtgtgttgcanataattgccattnccccgccaaatgttaagtgaggttctgangggtgaaggtgatanccccnggtggatgangtcnaantttttttcctgtcaagtaangngggtggaatntggaaagnannttggggctgcaatggggctgngnaatgaangatcngggccccntccccctaaaaagtttttanaaaanaaaaaaaangggaaaacccnttnnattcaaatgacctccaatggncccccccaggcntttttgggaaccaagccaaaagggtttancaagggaaccgggggggggaannntttttttggccagccttttnaaaanaacccaacccngcccctccnnggntnccccnaaaanccaaaatantggaaggttcaaaantntttttttngccccctgggaaaaaanggncntttttgggnggggttttccccgggagggnannnttggcccccctgaaanattgggggccaaattttttttttnttggagaaancccgggcccnnnaaaannccccgggaaaattcc

SEQ ID NO: 388 - DNA, 1179 bp, Homo Sapiens
  misc_feature (1)..(1): n is a, c, g, or t
  misc_feature (876)..(876): n is a, c, g, or t
  misc_feature (917)..(917): n is a, c, g, or t
  misc_feature (922)..(922): n is a, c, g, or t
  misc_feature (953)..(953): n is a, c, g, or t
  misc_feature (967)..(967): n is a, c, g, or t
  misc_feature (972)..(972): n is a, c, g, or t
  misc_feature (998)..(998): n is a, c, g, or t
  misc_feature (1001)..(1001): n is a, c, g, or t
  misc_feature (1012)..(1012): n is a, c, g, or t
  misc_feature (1027)..(1027): n is a, c, g, or t
  misc_feature (1042)..(1042): n is a, c, g, or t
  misc_feature (1085)..(1085): n is a, c, g, or t
  misc_feature (1089)..(1089): n is a, c, g, or t
  misc_feature (1091)..(1091): n is a, c, g, or t
  misc_feature (1097)..(1097): n is a, c, g, or t
  misc_feature (1107)..(1107): n is a, c, g, or t
  misc_feature (1131)..(1132): n is a, c, g, or t
  misc_feature (1140)..(1140): n is a, c, g, or t
  misc_feature (1143)..(1143): n is a, c, g, or t
  misc_feature (1146)..(1146): n is a, c, g, or t
  misc_feature (1156)..(1156): n is a, c, g, or t
  misc_feature (1159)..(1159): n is a, c, g, or t
  misc_feature (1178)..(1178): n is a, c, g, or t
naattagagaaattactatgagaggatcgcatcaccatcaccatcacggatcctatttaggtgacactatagaatcgtcgacccacgcgtccggtgaccgctactgctgccggtgtttgcgtgtggcagggagccaggcctggcgagcggggtgtgtcgcgatgccggagctggcagtgcagaaggtggtggtccaccccctggtgctgctcagtgtggtggatcatttcaaccgaatcggcaaggttggaaaccagaagcgtgttgttggtgtgcttttggggtcatggcaaaagaaagtacttgatgtatcgaacagttttgcagttccttttgatgaagatgacaaagacgattctgtatggtttttagaccatgattatttggaaaacatgtatggaatgtttaagaaagtcaatgccagggaaagaatagttggctggtaccacacaggccctaaactacacaagaatgacattgccatcaacgaactcatgaaaagatactgtcctaattccgtattggtcatcattgatgtgaagccgaaggacctagggctgcctacagaagcgtacatttcagtggaagaagtccatgatgatggaactccaacctcgaaaacatttgaacacgtgaccagtgaaattggagcagaggaagctgaggaagttggagttgaacacttgttacgagatatcaaagacacgacggtgggcactctgtcccagcggatcacaaaccaggtccatggtttgaagggactgaactccaagcttctggatatcaggagctacctggaaaaagtcgccacaggcaagctgcccatcaaccaccagatcatctaccagctgcaggacgtcttcaacctgctgccanatgtcagcctgcaggagttcgtcaaggccttttacctgaanaccantgaccaaatggtggtagtgtacttggcctcnctgatccgttccgnggtcnccctgcacaacctcatcaacaacaanatngccaaccgggnatgcaaaaaaaaaanaagggcaggaaaaanaaaaaagcaaaaaggataggaaaaaagaccaggaaaaaataanatangnaaaaantgttgttaanaaagaggaaaaaaaggaaaaaaannaaaccggnttnaanacctttttanttngaaattaaaacttaaaacna

SEQ ID NO: 389 - DNA, 1075 bp, Homo Sapiens
  misc_feature (1)..(1): n is a, c, g, or t
  misc_feature (768)..(768): n is a, c, g, or t
  misc_feature (800)..(800): n is a, c, g, or t
  misc_feature (842)..(842): n is a, c, g, or t
  misc_feature (896)..(896): n is a, c, g, or t
  misc_feature (910)..(910): n is a, c, g, or t
  misc_feature (922)..(922): n is a, c, g, or t
  misc_feature (947)..(947): n is a, c, g, or t
  misc_feature (960)..(960): n is a, c, g, or t
  misc_feature (973)..(974): n is a, c, g, or t
  misc_feature (980)..(980): n is a, c, g, or t
  misc_feature (985)..(985): n is a, c, g, or t
  misc_feature (1000)..(1000): n is a, c, g, or t
  misc_feature (1004)..(1004): n is a, c, g, or t
  misc_feature (1007)..(1007): n is a, c, g, or t
  misc_feature (1015)..(1015): n is a, c, g, or t
  misc_feature (1028)..(1028): n is a, c, g, or t
  misc_feature (1032)..(1032): n is a, c, g, or t
  misc_feature (1050)..(1051): n is a, c, g, or t
  misc_feature (1054)..(1075): n is a, c, g, or t
naattagagaaattactatgagaggatcgcatcaccatcaccatcacggatcctatttaggtgacactatagaatcgtcgacccacgcgtccgcttcgcggtgcccactccactccttgtgcggcgctaggccccccgtcccggtcatggccatgctcagggtccagcccgaggcccaagccaaggtggatgtgtttcgtgaagacctctgtaccaagacagagaacctgctcgggagctatttccccaagaagatttctgagctggatgcatttttaaaggagccagctctcaatgaagccaacttgagcaatctgaaggccccattggacatcccagtgcctgatccagtcaaggagaaagagaaagaggagcggaagaaacagcaggagaaggaagacaaggatgaaaagaagaagggggaggatgaagacaaaggtcctccctgtggcccagtgaactgcaatgaaaagatcgtggtccttctgcagcgcttgaagcctgagatcaaggatgtcattgagcagctcaacctggtcaccacctggttgcagctgcagatacctcggattgaggatggtaacaattttggagtggctgtccaggagaaggtgtttgagctgatgaccagcctccacaccaagctagaaggcttccacactcaaatctctaagtatttctctgagcgtggtgatgcagtgactaaagcagccaagcagccccatgtgggtgattatcggcagctggtgcacgagctggatgaggcanagtaccgggacatccggctgatggtcatgganatccgcaatgcttatgctgtgttatatgacatcatcctgaanaacttcgagaagctcaagaagcccagggaaaaacaaagggaatgatctattganaagccctctctccnttctgtgatgantacagcaaaaaccttcctgcttttnactggggactccnaattttccccaannttgctnctgtngaaatttttccctcncctngcncctcaggncaaaaaaaaaaanttanacccctgcccctccaaannaannnnnnnnnnnnnnnnnnnnnn

SEQ ID NO: 390 - DNA, 1179 bp, Homo Sapiens
  misc_feature (21)..(21): n is a, c, g, or t
  misc_feature (23)..(23): n is a, c, g, or t
  misc_feature (27)..(27): n is a, c, g, or t
  misc_feature (909)..(909): n is a, c, g, or t
  misc_feature (912)..(912): n is a, c, g, or t
  misc_feature (931)..(931): n is a, c, g, or t
  misc_feature (991)..(991): n is a, c, g, or t
  misc_feature (994)..(994): n is a, c, g, or t
  misc_feature (1016)..(1016): n is a, c, g, or t
  misc_feature (1022)..(1022): n is a, c, g, or t
  misc_feature (1037)..(1037): n is a, c, g, or t
  misc_feature (1044)..(1044): n is a, c, g, or t
  misc_feature (1049)..(1049): n is a, c, g, or t
  misc_feature (1053)..(1053): n is a, c, g, or t
  misc_feature (1056)..(1056): n is a, c, g, or t
  misc_feature (1058)..(1058): n is a, c, g, or t
  misc_feature (1066)..(1066): n is a, c, g, or t
  misc_feature (1071)..(1071): n is a, c, g, or t
  misc_feature (1091)..(1091): n is a, c, g, or t
  misc_feature (1093)..(1093): n is a, c, g, or t
  misc_feature (1109)..(1109): n is a, c, g, or t
  misc_feature (1111)..(1111): n is a, c, g, or t
  misc_feature (1117)..(1117): n is a, c, g, or t
  misc_feature (1133)..(1133): n is a, c, g, or t
  misc_feature (1138)..(1138): n is a, c, g, or t
  misc_feature (1145)..(1145): n is a, c, g, or t
  misc_feature (1147)..(1147): n is a, c, g, or t
  misc_feature (1150)..(1150): n is a, c, g, or t
  misc_feature (1154)..(1154): n is a, c, g, or t
  misc_feature (1167)..(1167): n is a, c, g, or t
  misc_feature (1172)..(1172): n is a, c, g, or t
  misc_feature (1179)..(1179): n is a, c, g, or t
agaaattactatgagaggatngnatcnccatcaccatcacggatcctatttaggtgacactatagaatcgtcgacccacgcgtccggccgcagaagcgagatgacgaagggaacgtcatcgtttggaaagcgtcgcaataagacgcacacgttgtgccgccgctgtggctctaaggcctaccaccttcagaagtcgacctgtggcaaatgtggctaccctgccaagcgcaagagaaagtataactggagtgccaaggctaaaagacgaaataccaccggaactggtcgaatgaggcacctaaaaattgtataccgcagattcaggcatggattccgtgaaggaacaacacctaaacccaagagggcagctgttgcagcatccagttcatcttaagaatgtcaacgattagtcatgcaataaatgttctggttttaaaaaatacatatctggttttggagtttggatcataatacaagagaagcacagggcaaagacactgcataacctcaagaactaagaatggaaggactggccaggcctggtggtgcacacctgtaatcccagctactcaggaggctgaggcgagagaatcgcttgagcctggggggcagaggttgcagtgagctgagagaacggcgggcggcagagcgagactccatctcaaaaaaaaaaaaggataaaggaaggacttaagcaaaatcttccttgtaagtagaaggatgttttgacaagaaaagttgcaatggaaaaatggttctcatgtacacgagtatgtagaataagcatcgtgtgtggattggattcagatcaaaacattgcttttatgtttgtgtctttatacggtgggagtataccctggtgccccaggatgaagacttgacctgacccatgtatttttagattactcncanataacaaaaagtattttcntcatgattagttgcgaaaacagttttatttcaataggtaaaacgtgcatcctatgtatcntcnaaggtaatcttaattatagctngggggngctttaacctgcaanctggcantgganggcncantnccccgganttcanctttccccttaaacttttcngnacctggaacctgcaantnaactcngggggaattaaagggnaaacnggaggtncnaangggnggggagtgggggnaaatnggggaan

SEQ ID NO: 391 - DNA, 434 bp, Homo Sapiens
  misc_feature (2)..(2): n is a, c, g, or t
  misc_feature (4)..(4): n is a, c, g, or t
  misc_feature (12)..(12): n is a, c, g, or t
  misc_feature (24)..(25): n is a, c, g, or t
  misc_feature (27)..(27): n is a, c, g, or t
  misc_feature (29)..(29): n is a, c, g, or t
tntnttcgaatnaaaagaaaattnntngngagaggatcgcatcaccatcaccatcacggtatcctatttaggtgacactattagaatcgtcgacccacgcgtccgcgacctacgcacacgagaacatgcctctcgcaaaggatctccttcatccctctccagaagaggagaagaggaaacacaagaagaaacgcctggtgcagagccccaattcctacttcatggatgtgaaatgcccaggatgctataaaatcaccacggtctttagccatgcacaaacggtagttttgtgtgttggctgctccactgtcctctgccagcctacaggaggaaaagcaaggcttacagaaggatgttccttcaggaggaagcagcactaaaagcactctgagtcaagatgagtgggaaaccatctcaataaacacattttggat

SEQ ID NO: 392 - DNA, 739 bp, Homo Sapiens
  misc_feature (4)..(4): n is a, c, g, or t
  misc_feature (9)..(9): n is a, c, g, or t
  misc_feature (11)..(11): n is a, c, g, or t
  misc_feature (31)..(31): n is a, c, g, or t
  misc_feature (36)..(36): n is a, c, g, or t
  misc_feature (41)..(41): n is a, c, g, or t
  misc_feature (45)..(45): n is a, c, g, or t
  misc_feature (51)..(51): n is a, c, g, or t
  misc_feature (120)..(120): n is a, c, g, or t
  misc_feature (706)..(706): n is a, c, g, or t
  misc_feature (710)..(719): n is a, c, g, or t
  misc_feature (733)..(734): n is a, c, g, or t
  misc_feature (736)..(737): n is a, c, g, or t
tttnttgantnattttcttgagaggatcgcntcccntcccntcanggatcntatttaggtgacactatagaatcgtcgacccacgcgtccggcgaggcagaacccgttcagaggacagcnaagaaggtggagggaaataaaggaactaaaagcctgaaggaaagtgaacaggagagtgaagaggagatcctagcccagaagaaagagcagagagaggaggaagtggaggaggaagagaaagaagaggatgaggaaaagggggattggaaacccagaaccaggagcaatggccggagaaagtcagctagggaggagaggagctgtaagcagaaaagccaggcaaagaggctcttgggagactcagacagcgaggaagagcagaaagaggcagccagcagtggggatgacagtgggagagatagagaacccccagtgcagaggaagagtgaggacaggacccagcttaagggtgggaagaggttgagtggaagcagcgaggacgaggaagacagtgggaagggggaacccacagctaaaggctctagaaagatggccagactgggcagcaccagtggtgaggaaagtgacttggagagggaggtaagtgacagcgaggcagggggaggcccccagggggagaggaagaaccgctcttccaagaagagctccaggaaaggcaggacacgaagctcctcttcctcctcanatgnnnnnnnnnnctcccccccccccnngnnaa

SEQ ID NO: 393 - DNA, 1179 bp, Homo Sapiens
  misc_feature (379)..(379): n is a, c, g, or t
  misc_feature (820)..(820): n is a, c, g, or t
  misc_feature (835)..(835): n is a, c, g, or t
  misc_feature (870)..(870): n is a, c, g, or t
  misc_feature (915)..(915): n is a, c, g, or t
  misc_feature (935)..(935): n is a, c, g, or t
  misc_feature (945)..(945): n is a, c, g, or t
  misc_feature (955)..(955): n is a, c, g, or t
  misc_feature (978)..(978): n is a, c, g, or t
  misc_feature (1006)..(1006): n is a, c, g, or t
  misc_feature (1022)..(1022): n is a, c, g, or t
  misc_feature (1027)..(1027): n is a, c, g, or t
  misc_feature (1039)..(1039): n is a, c, g, or t
  misc_feature (1047)..(1047): n is a, c, g, or t
  misc_feature (1050)..(1050): n is a, c, g, or t
  misc_feature (1070)..(1070): n is a, c, g, or t
  misc_feature (1088)..(1088): n is a, c, g, or t
  misc_feature (1090)..(1090): n is a, c, g, or t
  misc_feature (1106)..(1106): n is a, c, g, or t
  misc_feature (1112)..(1112): n is a, c, g, or t
  misc_feature (1119)..(1119): n is a, c, g, or t
  misc_feature (1129)..(1129): n is a, c, g, or t
  misc_feature (1131)..(1132): n is a, c, g, or t
  misc_feature (1153)..(1153): n is a, c, g, or t
  misc_feature (1155)..(1156): n is a, c, g, or t
  misc_feature (1165)..(1165): n is a, c, g, or t
  misc_feature (1167)..(1167): n is a, c, g, or t
  misc_feature (1175)..(1175): n is a, c, g, or t
tagagaaattactatgagaggatcgcatcaccatcaccatcacggatcctatttaggtgacactatagaatcgtcgacccacgcgtccgtgctgtccgaggaggaggccacccagatggaccagtttgggcaggcagcaggggtcctcattcacagtatccgagaaatagctcagtctcaccgggacatggagcaggaactggcccacgccgtcaatgccagctccaagtccatggaccgtgtgtatggcaagcccagaaccacagaggggctcaactgcagcttcgtcctggaaatggtgaataacttcagagctctgcgcagtgagacggagctgctgctgtctgggaagatggccctgcagctggatccgcctcanaaggagcagctggggagtgctcttgccgagatggaccgacagctcaggaggctggcagacaccccgtggctctgccagtccgcagagcccggcgacgaagagagtgtgatgctggatcttgccaagcgcagtcgcagtggtaaattccgcctcgtgaccaagtttaaaaaggagaaaaacaacaagaacaaagaagctcacagtagcctgggagccccggttcacctctgggggacagaggaggttgctgcctggctggagcacctcagtctctgtgagtataaggacatcttcacacggcacgacatccggggctctgagctcctgcacctggagcggagggacctcaaggacctgggcgtgaccaaggtgggccacatgaagaggatcctgtgtggcatcaaggagctgagccgcagcgcccccgccgtcgaggcctancctctgtcctctcancctgtggcctccacatccccgccgccgaggcctancctccgccctctcagcctgtggcctctgcgcctcctgccactgangccctgggcaaatgctgcancccgcccccnttctcatggngctacttcctctgtcagctacanaaagcctccgtgaaaccgtccaccaaanctctggggtctcgaanataanaacacagctacntttgaaanacnctttctccagctcaaaatcnctggggcaaatgtttcangncactcactcccccccncctgtnctggggncaaggaatcnanngggtctggcctctgggactgntnnctggccccngnttgaattncccg

SEQ ID NO: 394 - DNA, 1189 bp, Homo Sapiens
  misc_feature (3)..(3): n is a, c, g, or t
  misc_feature (18)..(21): n is a, c, g, or t
  misc_feature (25)..(25): n is a, c, g, or t
  misc_feature (36)..(36): n is a, c, g, or t
  misc_feature (43)..(43): n is a, c, g, or t
  misc_feature (50)..(50): n is a, c, g, or t
  misc_feature (58)..(58): n is a, c, g, or t
  misc_feature (78)..(78): n is a, c, g, or t
  misc_feature (81)..(81): n is a, c, g, or t
  misc_feature (90)..(90): n is a, c, g, or t
  misc_feature (103)..(103): n is a, c, g, or t
  misc_feature (767)..(767): n is a, c, g, or t
  misc_feature (881)..(881): n is a, c, g, or t
  misc_feature (902)..(902): n is a, c, g, or t
  misc_feature (955)..(955): n is a, c, g, or t
  misc_feature (962)..(962): n is a, c, g, or t
  misc_feature (970)..(970): n is a, c, g, or t
  misc_feature (1014)..(1014): n is a, c, g, or t
  misc_feature (1019)..(1019): n is a, c, g, or t
  misc_feature (1056)..(1056): n is a, c, g, or t
  misc_feature (1065)..(1065): n is a, c, g, or t
  misc_feature (1082)..(1082): n is a, c, g, or t
  misc_feature (1094)..(1094): n is a, c, g, or t
  misc_feature (1098)..(1098): n is a, c, g, or t
  misc_feature (1121)..(1121): n is a, c, g, or t
  misc_feature (1143)..(1143): n is a, c, g, or t
  misc_feature (1146)..(1147): n is a, c, g, or t
  misc_feature (1154)..(1154): n is a, c, g, or t
  misc_feature (1160)..(1160): n is a, c, g, or t
  misc_feature (1163)..(1163): n is a, c, g, or t
  misc_feature (1167)..(1167): n is a, c, g, or t
  misc_feature (1169)..(1169): n is a, c, g, or t
  misc_feature (1172)..(1172): n is a, c, g, or t
  misc_feature (1175)..(1175): n is a, c, g, or t
ttnagaggaaaaattacnnnngagnagggatcgcantcaccantcaccantcacgggnatcctatttagggtgacacntantagaatcgntcgacccacgcgntccgattgttctaaggccaggagcacggtgagccacagtctgttggtagaatttggcgtcttgatagttgagaaaatggcgatgacactgttggaagactggtgccgggggatggatgtgaactcccagagagctctgttagtctggggcatcccagtgaactgtgatgaggctgaaatcgaagagaccctccaggctgcgatgccccaggtctcctaccgaatgcttgggagaatgttctggagggaagaaaatgcgaaagcagccttattagagctcactggcgctgtagattacgccgcgatccccagggagatgccgggcaaaggaggggtctggaaagtgttatttaagcccccaacttctgatgctgaatttttagaaagattgcacctcttcctagctagagaggggtggaccgtgcaagatgttgcccgtgtccttgggtttcagaaccctactccgaccccgggcccagagatgccagcagagatgctaaactatattttggataatgttattcagcctcttgttgagtccatatggtacaagaggctgacacttttctcggggagggacatcccagggcctggagaggaaacctttgatccctggctggagcacactaatgaggtcctagaggagtggcaggtgtccgatgtanaaaagaggcggcggttgatggagagtcttaaaggccccgccgctgatgttattcgcatccttaagtccaaacaaccccgcgataaccactgccgaatgcctgaaggcgcttgancaggtgtttgggagcgttganagctctagggatgccccagatcaaatttctgaacacttatcaaaacccggganaaaaatngtctgctnatgtcattcgtctggagcctctgctacaaaaggtggtaaaaaanggggnccattgataaaataatgggaaccaggcccccctaaancaggtcatngccggggccaaccccancggggccctccnaagncactgtggcttaccgggctgggnaaggccaccccaacccctttcnttnntggggcnaatccnggngggnanccnggnggaggagaggagct

SEQ ID NO: 395 - DNA, 859 bp, Homo Sapiens
  misc_feature (1)..(1): n is a, c, g, or t
  misc_feature (816)..(816): n is a, c, g, or t
  misc_feature (824)..(824): n is a, c, g, or t
  misc_feature (832)..(832): n is a, c, g, or t
  misc_feature (838)..(841): n is a, c, g, or t
  misc_feature (843)..(843): n is a, c, g, or t
  misc_feature (846)..(846): n is a, c, g, or t
  misc_feature (853)..(853): n is a, c, g, or t
  misc_feature (857)..(857): n is a, c, g, or t
  misc_feature (859)..(859): n is a, c, g, or t
naatagagaaattactatgagaggatcgcatcaccattcaccatcacgggatcctatttaggtgacactatagaatcgtcgacccacgcgtccgtctacataaagattccacaggttccactgctgtgtcagctacaagggtgagaagaacagtgtggactggggtgaccttaacctggtgctgccctgtctggagtaccacaacaacacatggacatggctagactttgccatggctgtcaaaagggacagccgcaaagccctggttgcccaggtaatcaaagagaagctaaggctgaagtctgcaacaggctctgaggtccggggaaagctagaaactaaatcggacctgaacatgcaacagcaggaagaggaggagaaagcccggctcctcattggtttaagtgtgggcgacaagaaccctggcaagaagtccatctttggcaggcgcaaatgatttggcgattcgagtggctgcagtacaggatctgactctggctcaggctccagggacttgtggggtgggaggggcttcccgttatccacgaggatttgtgggtgtcagagcccataggcatcactcttcagcacctggtctgttcgctgcagggcatggtggacagtaatgctgagttctgtctcacactgatcaggctcagggccagagaggcaacaagagagcaagacccagggaatgggcccagggcaggaccctattcccttggggtcaagtgaaagggtagggggatagtcctgatcaagtgtgataaatttttatagacatatataaatatatatatattatatatataaaanaaaaaaanaaaaaaanaataannnncnccnatataanatanan

SEQ ID NO: 396 - DNA, 1123 bp, Homo Sapiens
  misc_feature (779)..(779): n is a, c, g, or t
  misc_feature (936)..(936): n is a, c, g, or t
  misc_feature (948)..(948): n is a, c, g, or t
  misc_feature (959)..(959): n is a, c, g, or t
  misc_feature (964)..(964): n is a, c, g, or t
  misc_feature (971)..(971): n is a, c, g, or t
  misc_feature (980)..(980): n is a, c, g, or t
  misc_feature (993)..(993): n is a, c, g, or t
  misc_feature (1004)..(1004): n is a, c, g, or t
  misc_feature (1006)..(1006): n is a, c, g, or t
  misc_feature (1015)..(1015): n is a, c, g, or t
  misc_feature (1020)..(1020): n is a, c, g, or t
  misc_feature (1035)..(1035): n is a, c, g, or t
  misc_feature (1038)..(1038): n is a, c, g, or t
  misc_feature (1041)..(1041): n is a, c, g, or t
  misc_feature (1046)..(1046): n is a, c, g, or t
  misc_feature (1055)..(1055): n is a, c, g, or t
  misc_feature (1060)..(1060): n is a, c, g, or t
  misc_feature (1062)..(1062): n is a, c, g, or t
  misc_feature (1082)..(1083): n is a, c, g, or t
  misc_feature (1086)..(1088): n is a, c, g, or t
  misc_feature (1090)..(1090): n is a, c, g, or t
  misc_feature (1093)..(1094): n is a, c, g, or t
  misc_feature (1096)..(1096): n is a, c, g, or t
  misc_feature (1101)..(1102): n is a, c, g, or t
  misc_feature (1104)..(1105): n is a, c, g, or t
  misc_feature (1113)..(1113): n is a, c, g, or t
  misc_feature (1117)..(1117): n is a, c, g, or t
  misc_feature (1122)..(1122): n is a, c, g, or t
tagagaaattactatgagaggatcgcatcaccatcaccatcacggatcctatttaggtgacactatagaatcgtcgacccacgcgtccgggatcattgaacctatcatccagcatgcagactggttcttccctggggagatagagttcaacattactggcaattatgggagtccagtacacgtgaaccataatgccaactacagctcaatgccctccccagacatggaccctgctgaccggcgccagcccgagcaggcccgccggcccctcagtgtcgccacggataatatgatgctggagttttacaaaaaggatggcatgggtgtgagggtcatggacacaaactgggtggctcgaagaggctcctcggccggtcggaaagtgtcctgcgccccgccctccatgcagcctcccgccccgcccgccgagctggctgcgcccctgccttcgccgctgccggagcagcccctggacagccccgcggcccccgcgctctctccatccggcctgggcctccagcctgggcccgagcgcaccagcacaacaaaaagcaaggaactttctccaggctctgcacagaaaggaagtccaggctccagccagggcacagcctgtgcagggactcaaccaggggctcaacctggagctcagccgggcgccagccccagccccagccagccgcctgcagaccagagtcctcacaccctccggaaagtttcaaagaagctggcaccgattccacccaaggtcccctttggccagccgggggctatggcanaccagtccgctggccagccgtccccagtcagcctgtcccccaccccgcccagcaccccgtcaccctatggactgagctaccctcaggggtactccttggcctcgggccagctctccccagctgcagctcctcccctggcctctccttctgtctttanaagcactttgancaaatcgcggncccantcctaanccgcgaaanaaaactaatctgncgcctcctcancntcccaaagnaaacntctcgcctctaatcnaantcnaggangcccccagntaaangnatgtccctgggaaaacatgnntannntntgnnanatganngnncattttgnaaantggang

SEQ ID NO: 397 - DNA, 1162 bp, Homo Sapiens
  misc_feature (3)..(3): n is a, c, g, or t
  misc_feature (808)..(808): n is a, c, g, or t
  misc_feature (860)..(860): n is a, c, g, or t
  misc_feature (939)..(939): n is a, c, g, or t
  misc_feature (945)..(945): n is a, c, g, or t
  misc_feature (955)..(955): n is a, c, g, or t
  misc_feature (960)..(960): n is a, c, g, or t
  misc_feature (967)..(967): n is a, c, g, or t
  misc_feature (970)..(970): n is a, c, g, or t
  misc_feature (975)..(975): n is a, c, g, or t
  misc_feature (985)..(985): n is a, c, g, or t
  misc_feature (994)..(996): n is a, c, g, or t
  misc_feature (1012)..(1012): n is a, c, g, or t
  misc_feature (1029)..(1029): n is a, c, g, or t
  misc_feature (1031)..(1031): n is a, c, g, or t
  misc_feature (1036)..(1036): n is a, c, g, or t
  misc_feature (1054)..(1054): n is a, c, g, or t
  misc_feature (1056)..(1056): n is a, c, g, or t
  misc_feature (1058)..(1059): n is a, c, g, or t
  misc_feature (1065)..(1065): n is a, c, g, or t
  misc_feature (1068)..(1068): n is a, c, g, or t
  misc_feature (1077)..(1077): n is a, c, g, or t
  misc_feature (1091)..(1091): n is a, c, g, or t
  misc_feature (1096)..(1096): n is a, c, g, or t
  misc_feature (1098)..(1098): n is a, c, g, or t
  misc_feature (1107)..(1107): n is a, c, g, or t
  misc_feature (1111)..(1112): n is a, c, g, or t
  misc_feature (1126)..(1126): n is a, c, g, or t
  misc_feature (1129)..(1129): n is a, c, g, or t
  misc_feature (1133)..(1133): n is a, c, g, or t
  misc_feature (1145)..(1145): n is a, c, g, or t
  misc_feature (1151)..(1151): n is a, c, g, or t
  misc_feature (1155)..(1156): n is a, c, g, or t
  misc_feature (1159)..(1159): n is a, c, g, or t
atntagagagattactatgagaggatcgcatcaccatcaccatcacggatcctatttaggtgacactatagaatcgtcgacccacgcgtccgggcaaataaccatggagaagactccaagttactttgtgacaaatgaggctcccaagcgcattcactccatggccaaggacatcaaactgattgtggtggtgagaaaccccgtgaccagggccatctctgactacacgcagacactgtcaaagaaacccgagatccccacctttgaggtgctggccttcaaaaaccggaccctcgggctgatcgatgcttcctggagtgccattcgaatagggatctatgcgctgcatctggaaaactggctccagtatttccccctctcccagatcctctttgtcagtggtgagcgactcattgtggaccccgccggggaaatggccaaagtacaggattttctaggcctcaaacgtgttgtgactgagaagcatttctatttcaacaaaaccaaggggttcccttgcctaaagaagccagaagacagcagtgccccgaggtgcttaggcaagagcaaaggtcggactcatcctcgcattgacccagatgtcatccacagactgaggaaattctacaaacccttcaacttgatgttttaccaaatgactggtcaagattttcagtgggaacaggaagagggtgataaatgaggctagagaggcagaggaaggctagtcaataagctaaggaggctccttgcctgagtccttgaataccccagcttctgcagcttcacttgctggagtgccaagtanatctccctcctccttcatgcagccaggattgcctccagtgctgttagcttangcaaacaggtggatcccatggcatccccatggaggaaccaggccccatctgggcagcagcatctggttgaccagatggnccccanaacccactgntcatncttatcntcngctanttaaaaaaancctgaaaannnaaggaaaaaataattngtcaatgtcaaaaaacngngcttnttaatggtatttgtgaancnannaaaaanggnctggctttnaaagggggttcccncctcnancttgggggnaccnngggttctaaccccnggnatcntgtcaaggggcncctggntgtnnaanccc

SEQ ID NO: 398 - DNA, 845 bp, Homo Sapiens
  misc_feature (2)..(2): n is a, c, g, or t
  misc_feature (737)..(737): n is a, c, g, or t
  misc_feature (751)..(751): n is a, c, g, or t
  misc_feature (764)..(764): n is a, c, g, or t
  misc_feature (788)..(788): n is a, c, g, or t
  misc_feature (794)..(794): n is a, c, g, or t
  misc_feature (820)..(820): n is a, c, g, or t
  misc_feature (822)..(824): n is a, c, g, or t
  misc_feature (826)..(826): n is a, c, g, or t
  misc_feature (828)..(830): n is a, c, g, or t
  misc_feature (833)..(842): n is a, c, g, or t
  misc_feature (845)..(845): n is a, c, g, or t
anagagaaattactatgagaggatcgcatcaccatcaccatcacggatcctatttaggtgacactatagaatcgtcgacccacgcgtccgcccacgcgtccgacctgctgtttggcaccgactaccccttcttccatgacccaccatctgtcttctacgactggacgccgggcatggcagtgccacgggacattgcagccgcctacctgctccagggaagcttctatggccactccatctacgctacgctatacatggacacctggcgcaaggactcggtggtcatgctgctccaccacgtggtcactctcatcctcatcgtctcctcctacgccttccggtaccacaatgtgggcatccttgtgctcttcctgcacgatatcagtgacgtgcagcttgagttcaccaagctcaacatttacttcaagtcccgcggcggctcctaccatcggctgcatgccttggcagcagacttgggctgcctcagcttcggcttcagctggttctggttccgcctctactggttcccgctcaaggtcctgtatgccaccagtcactgcagtctgcgcacggtgcctgacatccccttctacttcttcttcaatgcgctcctgctgctgctcacccttatgaacctctactggttcctgtacatcgtggcgtttgcagccaaggtgttgacaggccaggtgcacgagctgaaggacctgcgggagtatgacacagccgaggcccanagcctgaagcccancaaagccgaaaanccactgaggaacggcctggtgaangacaancgcttctgaacccctcggccccgccncnnngnannnggnnnnnnnnnnaan

SEQ ID NO: 399 - DNA, 1341 bp, Homo Sapiens
  misc_feature (788)..(788): n is a, c, g, or t
  misc_feature (853)..(853): n is a, c, g, or t
  misc_feature (886)..(886): n is a, c, g, or t
  misc_feature (895)..(895): n is a, c, g, or t
  misc_feature (905)..(906): n is a, c, g, or t
  misc_feature (911)..(911): n is a, c, g, or t
  misc_feature (926)..(926): n is a, c, g, or t
  misc_feature (935)..(935): n is a, c, g, or t
  misc_feature (944)..(944): n is a, c, g, or t
  misc_feature (948)..(948): n is a, c, g, or t
  misc_feature (951)..(951): n is a, c, g, or t
  misc_feature (955)..(955): n is a, c, g, or t
  misc_feature (972)..(972): n is a, c, g, or t
  misc_feature (1005)..(1005): n is a, c, g, or t
  misc_feature (1010)..(1011): n is a, c, g, or t
  misc_feature (1049)..(1049): n is a, c, g, or t
  misc_feature (1054)..(1054): n is a, c, g, or t
  misc_feature (1068)..(1069): n is a, c, g, or t
  misc_feature (1075)..(1075): n is a, c, g, or t
  misc_feature (1080)..(1080): n is a, c, g, or t
  misc_feature (1089)..(1089): n is a, c, g, or t
  misc_feature (1091)..(1091): n is a, c, g, or t
  misc_feature (1101)..(1101): n is a, c, g, or t
  misc_feature (1110)..(1110): n is a, c, g, or t
  misc_feature (1121)..(1121): n is a, c, g, or t
  misc_feature (1126)..(1126): n is a, c, g, or t
  misc_feature (1158)..(1159): n is a, c, g, or t
  misc_feature (1165)..(1166): n is a, c, g, or t
  misc_feature (1170)..(1170): n is a, c, g, or t
  misc_feature (1178)..(1179): n is a, c, g, or t
  misc_feature (1185)..(1185): n is a, c, g, or t
  misc_feature (1188)..(1188): n is a, c, g, or t
  misc_feature (1192)..(1192): n is a, c, g, or t
  misc_feature (1194)..(1194): n is a, c, g, or t
  misc_feature (1198)..(1198): n is a, c, g, or t
  misc_feature (1207)..(1207): n is a, c, g, or t
  misc_feature (1215)..(1215): n is a, c, g, or t
  misc_feature (1220)..(1220): n is a, c, g, or t
  misc_feature (1227)..(1227): n is a, c, g, or t
  misc_feature (1245)..(1245): n is a, c, g, or t
  misc_feature (1249)..(1249): n is a, c, g, or t
  misc_feature (1256)..(1256): n is a, c, g, or t
  misc_feature (1266)..(1268): n is a, c, g, or t
  misc_feature (1294)..(1294): n is a, c, g, or t
  misc_feature (1308)..(1309): n is a, c, g, or t
  misc_feature (1311)..(1312): n is a, c, g, or t
  misc_feature (1328)..(1328): n is a, c, g, or t
  misc_feature (1336)..(1336): n is a, c, g, or t
gaaatagagagaattactatgagaggatcgcatcaccatcaccatcacggatcctatttaggtgacactatagaatcgtcgacccacgcgtccgcccacgcgtccgagaaggcccagaactctgaaatgagaatgaagagagctcaggagtatgacagtagttttccaaactgggaatttgcccgaatgattaaagaatttcgggctactttggaatgtcatccacttactatgactgatcctatcgaagagcacagaatatgtgtctgtgttaggaaacgcccactgaataagcaagaattggccaagaaagaaattgatgtgatttccattcctagcaagtgtctcctcttggtacatgaacccaagttgaaagtggacttaacaaagtatctggagaaccaagcattctgctttgactttgcatttgatgaaacagcttcgaatgaagttgtctacaggttcacagcaaggccactggtacagacaatctttgaaggtggaaaagcaacttgttttgcatatggccagacaggaagtggcaagacacatactatgggcggagacctctctgggaaagcccagaatgcatccaaagggatctatgccatggcctcccgggacgtcttcctcctgaagaatcaaccctgctaccggaagttgggcctggaagtctatgtgacattcttcgagatctacaatgggaagctgtttgacctgctcaacaagaaggccaagctgcgcgtgctggaggacggcaagcaacaggtgcaagtggtggggctgcnggagcatctggttaactctgctgatgatgtcctcaagatgatcgaactgggccagccgcctgcanaaccctctgggccagacatttgccaactccaanttcctcccngctcccacgnngtggnttccaaattatttcnttcgagctnaaagggganaatngcntggncaagttcctctttgggnaaaaacttggccagggaaaagaaaccaaggccncggannccttccaatggctgaaccggccaaacccgccatggganggggnccaaaaaaatcaannaagaanttccntttaccccntnaaggaagggnctcccgggnccccggggaanaaaanaaagggccccaccccccgcttcccggggaaannaacctnnaccnaggggggnngagggnacncccntntctnggggaaaanctcctagnacttnccggtanggcccccaatcccccccnccanaaacccnccggggaaannncctttaaacccccgaaaaatatcaanacggggcccagganncnngaccccccccaggggnccccgggnaaacc

SEQ ID NO: 400 - DNA, 925 bp, Homo Sapiens
ctatgagaggatcgcatcaccatcaccatcacggatcctatttaggtgacactatagaatcgtcgacccacgcgtccgcccacgcgtccgcccacgcgtccggtaaggtttgctgcgccttgcttatttctgagtcccagaagctggcacattaccagagcaaaaaacatgccaacaaagtgaagagatacctagcaatccatggaatggagacattaaagggggaaacgaagaagctagactcagatcagaagagcagcagaagcaaagacaagaaccagtgctgccccatctgtaacatgaccttttcctcccctgtcgtggcccagtcgcactacctggggaagacccacgcaaagaacttaaagctgaagcagcagtccactaaggtggaagccttgcaccagaatagagagatgatagacccagacaagttctgcagcctctgccatgcaactttcaacgaccctgtcatggctcaacaacattatgtgggcaagaaacacagaaaacaggagaccaagctcaaactaatggcacgctatgggcggctggcggaccctgctgtcactgactttccagctggaaagggctacccctgcaaaacatgtaagatagtgctgaactccatagaacagtaccaagctcatgtcagcggcttcaaacacaagaaccagtcaccaaaaacagtggcatcatccctgggccagattccaatgcaaaggcaacccattcagaaagactcaaccaccttggaagactagaggtgattctgcccagcatcccatattgggccagccatgagccagcttcccgtgactgctcagcccttggctccctcttgctcgttgttctcaccaggaaagtacacgggcctgaggcaggattgggccacagacagcctctcattggtccgggctaattc

SEQ ID NO: 401 - DNA, 1287 bp, Homo Sapiens
  misc_feature (908)..(908): n is a, c, g, or t
  misc_feature (933)..(933): n is a, c, g, or t
  misc_feature (962)..(962): n is a, c, g, or t
  misc_feature (965)..(965): n is a, c, g, or t
  misc_feature (975)..(975): n is a, c, g, or t
  misc_feature (977)..(977): n is a, c, g, or t
  misc_feature (1007)..(1007): n is a, c, g, or t
  misc_feature (1017)..(1017): n is a, c, g, or t
  misc_feature (1021)..(1021): n is a, c, g, or t
  misc_feature (1025)..(1025): n is a, c, g, or t
  misc_feature (1030)..(1031): n is a, c, g, or t
  misc_feature (1033)..(1033): n is a, c, g, or t
  misc_feature (1046)..(1046): n is a, c, g, or t
  misc_feature (1050)..(1050): n is a, c, g, or t
  misc_feature (1057)..(1057): n is a, c, g, or t
  misc_feature (1060)..(1060): n is a, c, g, or t
  misc_feature (1064)..(1064): n is a, c, g, or t
  misc_feature (1081)..(1081): n is a, c, g, or t
  misc_feature (1090)..(1090): n is a, c, g, or t
  misc_feature (1095)..(1095): n is a, c, g, or t
  misc_feature (1103)..(1103): n is a, c, g, or t
  misc_feature (1105)..(1105): n is a, c, g, or t
  misc_feature (1112)..(1112): n is a, c, g, or t
  misc_feature (1118)..(1118): n is a, c, g, or t
  misc_feature (1121)..(1121): n is a, c, g, or t
  misc_feature (1125)..(1125): n is a, c, g, or t
  misc_feature (1151)..(1151): n is a, c, g, or t
  misc_feature (1169)..(1169): n is a, c, g, or t
  misc_feature (1201)..(1201): n is a, c, g, or t
  misc_feature (1204)..(1205): n is a, c, g, or t
  misc_feature (1209)..(1210): n is a, c, g, or t
  misc_feature (1222)..(1222): n is a, c, g, or t
  misc_feature (1238)..(1238): n is a, c, g, or t
  misc_feature (1243)..(1243): n is a, c, g, or t
  misc_feature (1245)..(1245): n is a, c, g, or t
  misc_feature (1248)..(1248): n is a, c, g, or t
  misc_feature (1252)..(1252): n is a, c, g, or t
  misc_feature (1268)..(1268): n is a, c, g, or t
  misc_feature (1272)..(1272): n is a, c, g, or t
  misc_feature (1275)..(1275): n is a, c, g, or t
  misc_feature (1287)..(1287): n is a, c, g, or t
aaatagagagaattactatgagaggatcgcatcaccatcaccatcacggatcctatttaggtgacactatagaatcgtcgacccacgcgtccgcaacacagcagtcccctcaggatgagcaggaaaagctcttggatgaagccatacaggctgtgaaggtccagtcattccaaatgaagagatgcctggacaaaaacaagcttatggatgctctaaaacatgcttctaatatgcttggtgaactccggacttctatgttatcaccaaagagttactatgaactttatatggccatttctgatgaactgcactacttggaggtctacctgacagatgagtttgctaaaggaaggaaagtggcagatctctacgaacttgtacagtatgctggaaacattatcccaaggctttaccttttgatcacagttggagttgtatatgtcaagtcatttcctcagtccaggaaggatattttgaaagatttggtagaaatgtgccgtggtgtgcaacatcccttgaggggtctgtttcttcgaaattaccttcttcagtgtaccagaaatatcttacctgatgaaggagagccaacagaattgttttgactggcatattggagcaagttgtaaactgtagggatgctttggctcaagaatatctcatggagtgtattattcaggttttccctgatgaatttcacctccagactttgaatccttttcttcgggcctgtgctgagttacaccagaatgtaaatgtgaagaacataatcattgctttaattgatagattagctttatttgctcaccgtgaagatggacctggaatcccagcggatattaaactttttgatatattttcacagcaggtggctaccagtgatacagtcctaaacaaaacatgccttccanaggatgttgtatcctttacaagtcncccctgaattaatccttgccatgaaaagntanccctgatcgngnggactatgttgaaaaagttcctaaaaaacnaacagtgggnaaanttcnaaaanncncaaccttgaacanattngcttacnagnaggncagtttccaaaggaacncccccaaanctttngaaaaaancnagttganccttanaanaaanttttaaacagtcttgaaaataaaaanttttccccccccccttgnaaactttaaccaccaaacccaaaaaaaacaanaanngttnngggcctaaaaangttccggaaaaaaccnaaaantnccncccnaaaaccggggaatccnaaanaanttgggacccccn

SEQ ID NO: 402 - DNA, 1179 bp, Homo Sapiens
  misc_feature (1)..(1): n is a, c, g, or t
  misc_feature (3)..(3): n is a, c, g, or t
  misc_feature (846)..(846): n is a, c, g, or t
  misc_feature (900)..(900): n is a, c, g, or t
  misc_feature (902)..(902): n is a, c, g, or t
  misc_feature (912)..(912): n is a, c, g, or t
  misc_feature (921)..(921): n is a, c, g, or t
  misc_feature (973)..(973): n is a, c, g, or t
  misc_feature (989)..(989): n is a, c, g, or t
  misc_feature (1001)..(1001): n is a, c, g, or t
  misc_feature (1023)..(1023): n is a, c, g, or t
  misc_feature (1031)..(1031): n is a, c, g, or t
  misc_feature (1036)..(1036): n is a, c, g, or t
  misc_feature (1088)..(1088): n is a, c, g, or t
  misc_feature (1090)..(1090): n is a, c, g, or t
  misc_feature (1093)..(1093): n is a, c, g, or t
  misc_feature (1100)..(1100): n is a, c, g, or t
  misc_feature (1112)..(1112): n is a, c, g, or t
  misc_feature (1116)..(1116): n is a, c, g, or t
  misc_feature (1120)..(1120): n is a, c, g, or t
  misc_feature (1123)..(1123): n is a, c, g, or t
  misc_feature (1138)..(1138): n is a, c, g, or t
  misc_feature (1150)..(1150): n is a, c, g, or t
  misc_feature (1158)..(1158): n is a, c, g, or t
  misc_feature (1173)..(1173): n is a, c, g, or t
nanttagagaaattactatgagaggatcgcatcaccatcaccatcacggatcctatttaggtgacactatagaatcgtcgacccacgcgtccggcttcgtgcacatgtgtcaggacctgcgtgtgctcaatgctgttcgggactatcacatcgggatcccgctcacctatagccaatataagcagctcaccatccaggtgctgctggacaggctcgtgttgcggagactttaccccctggccatccagatatgcgagtacttgcgccttcctgaagtacagggcgtcagcaggatcctggcccactgggcctgctacaaggtgcaacagaaggatgtctcagatgaggatgtggctcgagccattaaccagaagctgggggacacgcctggtgtctcttactccgacattgctgcacgagcctatggttgtggccgcacggagctggccatcaagctgctggagtatgagccacgctcaggggagcaggtaccccttctcctaaagatgaagaggagcaaactggcactaagcaaggccatcgagagcggggacactgacctggtgttcacggtgttgctgcacctgaagaacgagctgaaccgaggagattttttcatgacccttcggaatcagcccatggccctcagtttgtaccgacagttctgtaagcatcaggagctagagacgctgaaggacctttacaatcaggatgacaatcaccaggaattgggcagcttccacatccgagccagctatgctgcagaagagcgtattgaggggcgagtagcagctctgcagacagccgccgatgccttctacaaggccaagaatgagtttgcagccnaggctacagaggatcaaatgcggctcctacggctgcagcggcgcctaaaaaacnanctggggggcnagttcctanacctgtctctacatgacacagttaccaccctcattcttggcggtcaaaaaancgtgcaaacaactggnacgtgacttccncatccctgaaaaaagctctggnggctgaanctgantgccctggcaaattggaaaatgggaaaactaaaaattttccaaaacaaaaancnccnttggctnctgcctttgggnaatntgcntgnaacactaacaattcnaacccaaaattncttccccngggtcccaaaaaagnaaggtt

SEQ ID NO: 403 - DNA, 947 bp, Homo Sapiens
ctatgagaggatcgcatcaccatcaccatcacggatcctatttaggtgacactatagaatcgtcgacccacgcgtccgccggggtcgcgcgagagccgcaagcggagttggtgggcgctatgctatcacccgaggcagagcgagtgctgcggtaccttgtagaagtggaggagctcgccgaggaggtgctggcggacaagcggcagattgtggacctggacactaaaaggaatcagaatcgagagggcctgagggccctgcagaaggatctcagcctctctgaagatgtgatggtttgcttcgggaacatgtttatcaagatgcctcaccctgagacaaaggaaatgattgaaaaagatcaagatcatctggataaagaaatagaaaaactgcggaagcaacttaaagtgaaggtcaaccgcctttttgaggcccaaggcaaaccggagctgaagggttttaacttgaaccccctcaaccaggatgagcttaaagctctcaaggtcatcttgaaaggatgagactcaagaaccaagatgggggaccagcaaccccccagggtcatggaggacccaggaccctccaaccttgacacctgtaaggacaggatctgccctgtaaggggccagccgtcaggaatctggccatgaaaacctctttgtagtgcttggctactctgtgatggcaggagggaaccttcagcctgtctggctgctggacctggacaccagggctcggtggacacaagatctattgacgggccttggtagccaccagtgggtgtgtggggcagtggctgtgggggtgtaagaatgactgcaacaggcacttcccaacaatggcctgctgttcacatggaccctgagcaaggaaaggagggagggaggggcagagtggagtgtcattccagcattcctctcagaagggagagaggttttcaggctggt

SEQ ID NO: 404 - DNA, 1096 bp, Homo Sapiens
  misc_feature (900)..(900): n is a, c, g, or t
  misc_feature (917)..(917): n is a, c, g, or t
  misc_feature (920)..(920): n is a, c, g, or t
  misc_feature (925)..(925): n is a, c, g, or t
  misc_feature (940)..(940): n is a, c, g, or t
  misc_feature (946)..(946): n is a, c, g, or t
  misc_feature (950)..(950): n is a, c, g, or t
  misc_feature (957)..(957): n is a, c, g, or t
  misc_feature (965)..(965): n is a, c, g, or t
  misc_feature (984)..(984): n is a, c, g, or t
  misc_feature (990)..(990): n is a, c, g, or t
  misc_feature (998)..(998): n is a, c, g, or t
  misc_feature (1005)..(1005): n is a, c, g, or t
  misc_feature (1021)..(1021): n is a, c, g, or t
  misc_feature (1023)..(1023): n is a, c, g, or t
  misc_feature (1042)..(1042): n is a, c, g, or t
  misc_feature (1047)..(1048): n is a, c, g, or t
  misc_feature (1052)..(1054): n is a, c, g, or t
  misc_feature (1061)..(1061): n is a, c, g, or t
  misc_feature (1066)..(1066): n is a, c, g, or t
  misc_feature (1072)..(1072): n is a, c, g, or t
  misc_feature (1076)..(1076): n is a, c, g, or t
  misc_feature (1078)..(1078): n is a, c, g, or t
  misc_feature (1091)..(1091): n is a, c, g, or t
  misc_feature (1093)..(1093): n is a, c, g, or t
caatagagagattactatgagaggatcgcatcaccatcaccatcacggatcctatttaggtgacactatagaatcgtcgacccacgcgtccgaaggtgacatcctgcattcacaatgtcctgagtggtcagcgctggatcgagcactatggggaggtgctcatccgaaacacacaggacagctcctgccactgcaagatcaccttctgcaaggccaagtactggagttccaatgtccacgaggtgcagggcgctgtgctcagtcggagtggccgtgtcctccaccgactctttgggaagtggcacgaggggctgtaccggggacccacgccaggtggccagtgcatctggaaacccaactcaatgccccccgaccatgagcgaaacttcggcttcacccagtttgccttggagctgaatgagctgacagcagagctgaaacggtcgctgccttccaccgacacgagactccggccagaccagaggtacctggaggaggggaacatacaggccgctgaggcccagaagagaaggatcgagcagctgcagcgagacaggcgcaaagtcatggaggaaaacaacatcgtacaccaggctcgcttcttcaggcggcagacggatagcagcgggaaagagtggtgggtgaccaacaatacctactggaggctgcgggccgagccaggctacgggaacatggatggggccgtgctctggtagccctggccccgggggcaggaggctctggttcctcactcctcctgcctccacccccctaccatgaacacatgggtgaggccgggctccccgcctcactgcccttgagaccaaaggggcagccctggccctccctcccctctgctggccagagggtctgcattctcagcccaccccccaaccccanccgtttggggtgaaaancanaatcntgtgctttcccccanttctcnttgncccaaanaaccagcnttgttaaaaccctttcccnctttcncaattccnaatttcnggtccccttttggggnantttggggaaaactctggtncccannattnnnttcccantttcnagtgcnttcnangaaaaagggaaantncct

SEQ ID NO: 405 - DNA, 897 bp, Homo Sapiens
actatgagaggtcgcatcaccatcaccatcacggatcctatttaggtgacactatagaatcgtcgacccacgcgtccgcaggcgtgcttgtgggacacccgtttgacacggtcaaggtacggcttcaggtccagagcgtggagaagcctcagtaccgcgggacgttgcactgcttcaagtccatcatcaagcaagagagcgtgctgggcctgtacaagggcctgggctcgccgctcatggggctcaccttcatcaacgcgctggtgttcggggtgcagggcaacaccctccgggccctgggccacgactcgcccctcaaccagttcctggcaggtgcggcggcgggcgccatccagtgcgtcatctgctgccccatggagctggccaagacgcggctgcagctgcaggacgcgggcccagcgcgcacctacaagggctcgctggactgcctcgcgcagatctacgggcacgagggtctgcgtggcgtcaaccggggcatggtgtccacgttgctgcgtgagactcccagcttcggcgtctacttcctcacctatgacgctctcacgcgggcgctgggctgcgagccgggcgaccgcctgctggtgcccaagctgctgttggcgggcggtacgtcaggcatcgtgtcctggctctctacctatcctgtggacgtggtcaagtcgcggctgcaggcggacggactgcggggcgccccgcgctaccgcggcatcctggactgcgtgcaccagagctaccgcgccgagggctggcgcgtcttcacacgggggctggcgtccacgctgctgcgcgccttccccgtcaacgctgccaccttcgccaccgtcacggtggtgctcacctacgcgcgcggcgaggaggccgggcccgagggcgagg

SEQ ID NO: 406 - DNA, 1179 bp, Homo Sapiens
  misc_feature (883)..(883): n is a, c, g, or t
  misc_feature (920)..(920): n is a, c, g, or t
  misc_feature (924)..(924): n is a, c, g, or t
  misc_feature (927)..(927): n is a, c, g, or t
  misc_feature (946)..(946): n is a, c, g, or t
  misc_feature (953)..(953): n is a, c, g, or t
  misc_feature (970)..(970): n is a, c, g, or t
  misc_feature (979)..(979): n is a, c, g, or t
  misc_feature (983)..(983): n is a, c, g, or t
  misc_feature (1047)..(1047): n is a, c, g, or t
  misc_feature (1063)..(1063): n is a, c, g, or t
  misc_feature (1071)..(1071): n is a, c, g, or t
  misc_feature (1078)..(1078): n is a, c, g, or t
  misc_feature (1083)..(1083): n is a, c, g, or t
  misc_feature (1088)..(1088): n is a, c, g, or t
  misc_feature (1101)..(1101): n is a, c, g, or t
  misc_feature (1114)..(1114): n is a, c, g, or t
  misc_feature (1116)..(1116): n is a, c, g, or t
  misc_feature (1129)..(1129): n is a, c, g, or t
  misc_feature (1137)..(1137): n is a, c, g, or t
  misc_feature (1139)..(1139): n is a, c, g, or t
  misc_feature (1144)..(1145): n is a, c, g, or t
  misc_feature (1148)..(1148): n is a, c, g, or t
  misc_feature (1152)..(1152): n is a, c, g, or t
  misc_feature (1156)..(1157): n is a, c, g, or t
  misc_feature (1163)..(1163): n is a, c, g, or t
  misc_feature (1169)..(1170): n is a, c, g, or t
aatagagagattaactatgagaggatcgcatcaccatcaccatcacggatcctatttaggtgacactatagaatcgtcgacccacgcgtccgtccagagagccatggccgccctgcgtgtcctgctgtcctgcgcccgcggcccgctgaggcccccggttcgctgtcccgcctggcgtcccttcgcctcgggtgctaactttgagtacatcatcgcagaaaaaagagggaagaataacaccgtggggttgatccaactgaaccgccccaaggccctcaatgcactttgcgatggcctgattgacgagctcaaccaggccctgaagatcttcgaggaggacccggccgtgggggccattgtcctcaccggcggggataaggcctttgcagctggagctgatatcaaggaaatgcagaacctgagtttccaggactgttactccagcaagttcttgaagcactgggaccacctcacccaggtcaagaagccagtcatcgctgctgtcaatggctatgcctttggcgggggctgtgagcttgccatgatgtgtgatatcatctatgccggtgagaaggcccagtttgcacagccggagatcttaataggaaccatcccaggtgcgggcggcacccagagactcacccgtgctgttgggaagtcgctggcgatggagatggtcctcaccggtgaccggatctcagcccaggacgccaagcaagcaggtcttgtcagcaagatttgtcctgttgagacactggtggaagaagccatccagtgtgcagaaaaaattgccagcaattctaaaattgtagtagcgatggccaaagaatcagtgaatgcagcttttgaaatgacattaacagaaggaagtaagttggaaaanaaactcttttattcaacctttgccactgatgaccggnaaanaanggatgaaccgcgtttgtgnaaaaaanaaaggccaacttcaaanaccagtganaacnagctgccccctgcttcacacctctgcttgaaaagaaaaatgcaccctgtcattttaaaaacaantaaatcatcctctttnaaaaacantgtccgnggggngcaanttcctccccaatngctgcggggtcgngncccaacctctcanggaaaaananctttnntcnccancctnngaaggntctgannggaacacct

SEQ ID NO: 407 - DNA, 1175 bp, Homo Sapiens
  misc_feature (1)..(1): n is a, c, g, or t
  misc_feature (803)..(803): n is a, c, g, or t
  misc_feature (818)..(818): n is a, c, g, or t
  misc_feature (834)..(834): n is a, c, g, or t
  misc_feature (841)..(841): n is a, c, g, or t
  misc_feature (850)..(850): n is a, c, g, or t
  misc_feature (889)..(889): n is a, c, g, or t
  misc_feature (901)..(901): n is a, c, g, or t
  misc_feature (915)..(915): n is a, c, g, or t
  misc_feature (953)..(953): n is a, c, g, or t
  misc_feature (986)..(986): n is a, c, g, or t
  misc_feature (990)..(990): n is a, c, g, or t
  misc_feature (1017)..(1017): n is a, c, g, or t
  misc_feature (1036)..(1036): n is a, c, g, or t
  misc_feature (1039)..(1039): n is a, c, g, or t
  misc_feature (1055)..(1055): n is a, c, g, or t
  misc_feature (1057)..(1057): n is a, c, g, or t
  misc_feature (1066)..(1066): n is a, c, g, or t
  misc_feature (1082)..(1082): n is a, c, g, or t
  misc_feature (1086)..(1086): n is a, c, g, or t
  misc_feature (1093)..(1093): n is a, c, g, or t
  misc_feature (1104)..(1104): n is a, c, g, or t
  misc_feature (1113)..(1115): n is a, c, g, or t
  misc_feature (1117)..(1118): n is a, c, g, or t
  misc_feature (1137)..(1137): n is a, c, g, or t
  misc_feature (1144)..(1144): n is a, c, g, or t
  misc_feature (1148)..(1150): n is a, c, g, or t
  misc_feature (1152)..(1153): n is a, c, g, or t
  misc_feature (1157)..(1157): n is a, c, g, or t
  misc_feature (1159)..(1159): n is a, c, g, or t
  misc_feature (1163)..(1163): n is a, c, g, or t
naaatagagaaattactatgagaggatcgcatcaccatcaccatcacggatcctatttaggtgacactatagaatcgtcgacccacgcgtccgcccacgcgtccgcccacgcgtccgagctggggaaccccatgaagagaggtgcccaggtcaccttctacctcatccttagcacctccgggatcagcattgagaccacggaactggaggtagagctgctgttggccacgatcagtgagcaggagctgcatccagtctctgcacgagcccgtgtcttcattgagctgccactgtccattgcaggaatggccattccccagcaactcttcttctctggtgtggtgaggggcgagagagccatgcagtctgagcgggatgtgggcagcaaggtcaagtatgaggtcacggtttccaaccaaggccagtcgctcagaaccctgggctctgccttcctcaacatcatgtggcctcatgagattgccaatgggaagtggttgctgtacccaatgcaggttgagctggagggcgggcaggggcctgggcagaaagggctttgctctcccaggcccaacatcctccacctggatgtggacagtagggataggaggcggcgggagctggagccacctgagcagcaggagcctggtgagcggcaggagcccagcatgtcctggtggccagtgtcctctgctgagaagaagaaaaacatcaccctggactgcgcccggggcacggccaactgtgtggtgttcagctgcccactctacagctttgaccgcgcggctgtgctgcatgtctggggnccgtctctggaacancacctttctggaggantactcanctgtgaaantccctggaagtgattgtccgggccaacatcacagtgaantcctccataaanaacttgatgctccnagatgcctccacagtgatcccagtgatggtatacttgnaacccatggctgtgggggccaaaaagaatgccntggngggtcatcctcctggctgtactggctngggctgctggggctaacantgntggggctgcctcctgngnaaaaatggnatttttcaaacgggcnaaanccccccnaaggcccccgngcccccaannncnngggggggaaaaattccccnggaaaanccannncnntttnangggngaaaaaaaaggg

SEQ ID NO: 408 - DNA, 1206 bp, Homo Sapiens
  misc_feature (3)..(3): n is a, c, g, or t
  misc_feature (880)..(880): n is a, c, g, or t
  misc_feature (882)..(882): n is a, c, g, or t
  misc_feature (893)..(893): n is a, c, g, or t
  misc_feature (919)..(919): n is a, c, g, or t
  misc_feature (957)..(957): n is a, c, g, or t
  misc_feature (966)..(966): n is a, c, g, or t
  misc_feature (974)..(974): n is a, c, g, or t
  misc_feature (977)..(977): n is a, c, g, or t
  misc_feature (985)..(985): n is a, c, g, or t
  misc_feature (1021)..(1021): n is a, c, g, or t
  misc_feature (1029)..(1029): n is a, c, g, or t
  misc_feature (1034)..(1034): n is a, c, g, or t
  misc_feature (1057)..(1057): n is a, c, g, or t
  misc_feature (1059)..(1059): n is a, c, g, or t
  misc_feature (1064)..(1065): n is a, c, g, or t
  misc_feature (1077)..(1077): n is a, c, g, or t
  misc_feature (1079)..(1079): n is a, c, g, or t
  misc_feature (1084)..(1084): n is a, c, g, or t
  misc_feature (1086)..(1086): n is a, c, g, or t
  misc_feature (1100)..(1100): n is a, c, g, or t
  misc_feature (1103)..(1103): n is a, c, g, or t
  misc_feature (1105)..(1105): n is a, c, g, or t
  misc_feature (1107)..(1107): n is a, c, g, or t
  misc_feature (1111)..(1111): n is a, c, g, or t
  misc_feature (1123)..(1123): n is a, c, g, or t
  misc_feature (1125)..(1125): n is a, c, g, or t
  misc_feature (1132)..(1132): n is a, c, g, or t
  misc_feature (1142)..(1142): n is a, c, g, or t
  misc_feature (1155)..(1155): n is a, c, g, or t
  misc_feature (1157)..(1157): n is a, c, g, or t
  misc_feature (1169)..(1169): n is a, c, g, or t
  misc_feature (1173)..(1173): n is a, c, g, or t
  misc_feature (1180)..(1181): n is a, c, g, or t
  misc_feature (1184)..(1184): n is a, c, g, or t
  misc_feature (1186)..(1186): n is a, c, g, or t
  misc_feature (1188)..(1188): n is a, c, g, or t
  misc_feature (1195)..(1195): n is a, c, g, or t
atngagaaattactatgagaggatcgcatcaccatcaccatcacggatcctatttaggtgacactatagaatcgtcgacccacgcgtccggatttgtaaaccccggagcgaggttctgcttacccgaggccgctgctgtgcggagacccccgggtgaagccaccgtcatcatgtctgaccaggaggcaaaaccttcaactgaggacttgggggataagaaggaaggtgaatatattaaactcaaagtcattggacaggatagcagtgagattcacttcaaagtgaaaatgacaacacatctcaagaaactcaaagaatcatactgtcaaagacagggtgttccaatgaattcactcaggtttctctttgagggtcagagaattgctgataatcatactccaaaagaactgggaatggaggaagaagatgtgattgaagtttatcaggaacaaacggggggtcattcaacagtttagatattctttttattttttttcttttccctcaatccttttttatttttaaaaatagttcttttgtaatgtggtgttcaaaacggaattgaaaactggcaccccatctctttgaaacatctggtaatttgaattctagtgctcattattcattattgtttgttttcattgtgctgatttttggtgatcaagcctcagtccccttcatattaccctctcctttttaaaaattacgtgtgcacagagaggtcacctttttcaggacattgcattttcaggcttgtggtgataaataagatcgaccaatgcaagtgttcataatgactttccaattggccctgatgttctagcatgtgattacttcactcctggactgtgactttcagtgggagatggaagtttttcananaactgaactgnggaaaaatgacctttccttaacttgnaagctacttttaaaatttgagggtctggaccaaagaanagaatatcnggttgaantcnagatgacngataaggggagagtatgactaactccaagatggctnccctgaanaaagncatttaaaatttttaaaatcttncnaaaannccaaaaagttcnantttcntnaccaattaataaanctntncntgcnaaatgaatacancnaacccgncccttttganttattggactttngnccgggaaagggntttnaaagganntgncngnccccctnttttaaaaaaa

SEQ ID NO: 409 - DNA, 1032 bp, Homo Sapiens
  misc_feature (1)..(1): n is a, c, g, or t
  misc_feature (4)..(4): n is a, c, g, or t
  misc_feature (777)..(777): n is a, c, g, or t
  misc_feature (811)..(811): n is a, c, g, or t
  misc_feature (835)..(835): n is a, c, g, or t
  misc_feature (860)..(860): n is a, c, g, or t
  misc_feature (864)..(864): n is a, c, g, or t
  misc_feature (882)..(882): n is a, c, g, or t
  misc_feature (894)..(894): n is a, c, g, or t
  misc_feature (926)..(926): n is a, c, g, or t
  misc_feature (930)..(930): n is a, c, g, or t
  misc_feature (955)..(955): n is a, c, g, or t
  misc_feature (961)..(961): n is a, c, g, or t
  misc_feature (963)..(963): n is a, c, g, or t
  misc_feature (976)..(976): n is a, c, g, or t
  misc_feature (990)..(991): n is a, c, g, or t
  misc_feature (995)..(996): n is a, c, g, or t
  misc_feature (1003)..(1003): n is a, c, g, or t
  misc_feature (1005)..(1005): n is a, c, g, or t
  misc_feature (1012)..(1012): n is a, c, g, or t
  misc_feature (1015)..(1015): n is a, c, g, or t
  misc_feature (1021)..(1021): n is a, c, g, or t
  misc_feature (1026)..(1029): n is a, c, g, or t
  misc_feature (1031)..(1031): n is a, c, g, or t
natngagagattactatgagaggatcgcatcaccatcaccatcacggatcctatttaggtgacactatagaatcgtcgacccacgcgtccgctcgcgtcacagccgggatgaagccgatcctactgcagggccatgagcggtccattacgcagattaagtataaccgcgaaggagacctcctctttactgtggccaaggaccctatcgtcaatgtatggtactctgtgaatggtgagaggctgggcacctacatgggccataccggagctgtgtggtgtgtggacgctgactgggacaccaagcatgtcctcactggctcagctgacaacagctgtcgtctctgggactgtgaaacaggaaagcagctggcccttctcaagaccaattcggctgtccggacctgcggttttgactttgggggcaacatcatcatgttctccacggacaagcagatgggctaccagtgctttgtgagcttttttgacctgcgggatccgagccagattgacaacaatgagccctacatgaagatcccttgcaatgactctaaaatcaccagtgctgtttggggacccctgggggagtgcatcatcgctggccatgagagtggagagctcaaccagtatagtgccaagtctggagaggtgttggtgaatgttaaggagcactcccggcagatcaacgacatccagttatccagggacatgaccatgtttgtgaccgcgtccaaggacaacacagccaagctttttgactccacaactcttgaacatcanaagactttccggacagaacgtcctgtcaactcanctgccctctccccccaactatgancatgtggtcctggggcggtggtcangaanccatggatgtaacccacnaccctcccaccnagaattggcaagtttgaggccaggttcttccntttnggcctttgaaaaaaaaaattttggnaaaaancnaagggtcactttngaacctatcaacanngttnnccttccntncctgaanggnaaaaanctacnnnnanc

SEQ ID NO: 410 - DNA, 1113 bp, Homo Sapiens
  misc_feature (830)..(830): n is a, c, g, or t
  misc_feature (836)..(836): n is a, c, g, or t
  misc_feature (854)..(854): n is a, c, g, or t
  misc_feature (857)..(857): n is a, c, g, or t
  misc_feature (865)..(865): n is a, c, g, or t
  misc_feature (873)..(873): n is a, c, g, or t
  misc_feature (913)..(913): n is a, c, g, or t
  misc_feature (945)..(945): n is a, c, g, or t
  misc_feature (974)..(974): n is a, c, g, or t
  misc_feature (981)..(981): n is a, c, g, or t
  misc_feature (996)..(996): n is a, c, g, or t
  misc_feature (1001)..(1001): n is a, c, g, or t
  misc_feature (1007)..(1007): n is a, c, g, or t
  misc_feature (1015)..(1015): n is a, c, g, or t
  misc_feature (1018)..(1018): n is a, c, g, or t
  misc_feature (1021)..(1021): n is a, c, g, or t
  misc_feature (1024)..(1024): n is a, c, g, or t
  misc_feature (1031)..(1031): n is a, c, g, or t
  misc_feature (1037)..(1038): n is a, c, g, or t
  misc_feature (1044)..(1044): n is a, c, g, or t
  misc_feature (1051)..(1052): n is a, c, g, or t
  misc_feature (1055)..(1055): n is a, c, g, or t
  misc_feature (1060)..(1060): n is a, c, g, or t
  misc_feature (1064)..(1064): n is a, c, g, or t
  misc_feature (1072)..(1073): n is a, c, g, or t
  misc_feature (1079)..(1079): n is a, c, g, or t
  misc_feature (1096)..(1096): n is a, c, g, or t
  misc_feature (1104)..(1104): n is a, c, g, or t
tagagaaattactatgagaggatcgcatcaccatcaccatcacggatcctatttaggtgacactatagaatcgtcgacccacgcgtccgctgacgaggacctggcgcaggtggtggacgagctcatccaggaggccctgcagagggactgtgaggaagttggctctgcgggtgctgcctacgcagctgccgccctgggtgtttctaatgctgctatggaggatttgttaacagctgcaaccacgggcattttgaggcacattgcagctgaagaagtgtctaaggaaagagagcgaagggagcaggagaggcagcgggctgaagaggaaaggttgaaacaagagagagagctggtgttaagtgagctgagccagggcctggccgtggagctgatggaacgcgtgatgatggagtttgtgagggaaacctgctcccaggagttgaagaatgcagtagagacagaccagagggtccgtgtggcccgttgctgtgaggatgtctgtgcccacttagtggacttgtttctcgtggaggaaatcttccagactgcaaaggagaccctccaggagcttcagtgcttctgcaagtatctacagcggtggagggaagctgtcacagcccgcaagaaactgaggcgccaaatgcgggctttccctgctgcgccctgctgcgtggacgtgagcgaccggctgagggcgctggcgcccagcgcaaagtgccccattgctgaagagaacctggccaggggcctcctggacctgggccatgcagggagattgggcatctcctgcaccaggttaaggcggctcagaaacaagacagctcacccanatgaangttcagcacttctaccancanctgctgantgatgtgncatgggcgtctctggacctgccatccctcgtggctgaacncctcccctgggaagcaagaacatgtgttttgnaacctggtgctgtgttcccgaatgtaaanaaccatncccaaaaattttggncaagngggccntgcccccncanganggngccattnaagctnngaaaancaaaaannacncctgnaacnaatgggcnnatctgntgctttccccccaaaanaaaatganacctgcaaa

SEQ ID NO: 411 - DNA, 1145 bp, Homo Sapiens
  misc_feature (1)..(2): n is a, c, g, or t
  misc_feature (877)..(877): n is a, c, g, or t
  misc_feature (895)..(895): n is a, c, g, or t
  misc_feature (898)..(898): n is a, c, g, or t
  misc_feature (917)..(917): n is a, c, g, or t
  misc_feature (921)..(921): n is a, c, g, or t
  misc_feature (927)..(927): n is a, c, g, or t
  misc_feature (933)..(933): n is a, c, g, or t
  misc_feature (950)..(950): n is a, c, g, or t
  misc_feature (977)..(977): n is a, c, g, or t
  misc_feature (982)..(982): n is a, c, g, or t
  misc_feature (989)..(989): n is a, c, g, or t
  misc_feature (992)..(992): n is a, c, g, or t
  misc_feature (996)..(996): n is a, c, g, or t
  misc_feature (1003)..(1003): n is a, c, g, or t
  misc_feature (1015)..(1015): n is a, c, g, or t
  misc_feature (1017)..(1017): n is a, c, g, or t
  misc_feature (1021)..(1021): n is a, c, g, or t
  misc_feature (1023)..(1023): n is a, c, g, or t
  misc_feature (1027)..(1027): n is a, c, g, or t
  misc_feature (1031)..(1032): n is a, c, g, or t
  misc_feature (1039)..(1039): n is a, c, g, or t
  misc_feature (1045)..(1045): n is a, c, g, or t
  misc_feature (1051)..(1051): n is a, c, g, or t
  misc_feature (1054)..(1054): n is a, c, g, or t
  misc_feature (1058)..(1058): n is a, c, g, or t
  misc_feature (1060)..(1060): n is a, c, g, or t
  misc_feature (1070)..(1070): n is a, c, g, or t
  misc_feature (1078)..(1078): n is a, c, g, or t
  misc_feature (1083)..(1083): n is a, c, g, or t
  misc_feature (1095)..(1095): n is a, c, g, or t
  misc_feature (1106)..(1106): n is a, c, g, or t
  misc_feature (1109)..(1109): n is a, c, g, or t
  misc_feature (1115)..(1115): n is a, c, g, or t
  misc_feature (1118)..(1118): n is a, c, g, or t
  misc_feature (1126)..(1126): n is a, c, g, or t
  misc_feature (1130)..(1130): n is a, c, g, or t
  misc_feature (1132)..(1132): n is a, c, g, or t
  misc_feature (1141)..(1141): n is a, c, g, or t
nngagaaattactatgagaggatcgcatcaccatcaccatcacggatcctatttaggtgacactatagaatcgtcgacccacgcgtccgctgaggaggcggcggtggctcccggggcgtttgagcgggctcacccgagcccgcgggccaacgcggatccaggcccgactggcgggaccgccccggattccccgcgggccttcctagccgccatggaggacggcgtctatgaacccccagacctgactccggaggagcggatggagctggagaacatccggcggcggaagcaggagctgctggtggagattcagcgcctgcgggaggagctcagtgaagccatgagcgaggtggaggggctggaggccaatgagggcagtaagaccttgcaacggaaccggaagatggtaatgggcaggaagaagttcaacatggaccccaagaaggggatccagttcttggtggagaatgaactgctgcagaacacacccgaggagatcgcccgcttcctgtacaagggcgaggggctgaacaagacagccatcggggactacctgggggagagggaagaactgaacctggcagtgctccatgcttttgtggatctgcatgagttcaccgacctcaatctggtgcaggccctcaggcagtttctatggagctttcgcctacccggagaggcccagaaaattgaccggatgatggaggccttcgcccagcgatactgcctgtgcaaccctggggttttccagtccacagacacgtgctatgtgctgtccttcgccgtcatcatgctcaacaccagtctccacaatcccaatgtccgggacaagccgggcctggagcgctttgtggccatgaaccggggcatcaacganggcggggacctgcctganganctgctcaggaacctgtacnacancatccnaatgancccttcaaattcctgangatgacgggaatgacctgacccacacnttctnaacccgnacngganggctggntctgaaactggnangggncnggtnaaanntgaaacngcctgnttatcntcnaaanantgctctatantttaatancccgnaaaggaccccangaatctccccntgnaatttnacntccaaagntganancccgaaacnaatt

SEQ ID NO: 412 - DNA, 977 bp, Homo Sapiens
  misc_feature (656)..(656): n is a, c, g, or t
  misc_feature (667)..(667): n is a, c, g, or t
  misc_feature (669)..(669): n is a, c, g, or t
  misc_feature (676)..(676): n is a, c, g, or t
  misc_feature (743)..(743): n is a, c, g, or t
  misc_feature (747)..(747): n is a, c, g, or t
  misc_feature (750)..(750): n is a, c, g, or t
  misc_feature (774)..(774): n is a, c, g, or t
  misc_feature (791)..(791): n is a, c, g, or t
  misc_feature (794)..(794): n is a, c, g, or t
  misc_feature (804)..(804): n is a, c, g, or t
  misc_feature (812)..(812): n is a, c, g, or t
  misc_feature (815)..(815): n is a, c, g, or t
  misc_feature (823)..(823): n is a, c, g, or t
  misc_feature (825)..(827): n is a, c, g, or t
  misc_feature (831)..(831): n is a, c, g, or t
  misc_feature (836)..(836): n is a, c, g, or t
  misc_feature (843)..(843): n is a, c, g, or t
  misc_feature (847)..(847): n is a, c, g, or t
  misc_feature (849)..(849): n is a, c, g, or t
  misc_feature (856)..(856): n is a, c, g, or t
  misc_feature (869)..(869): n is a, c, g, or t
  misc_feature (871)..(871): n is a, c, g, or t
  misc_feature (874)..(874): n is a, c, g, or t
  misc_feature (877)..(877): n is a, c, g, or t
  misc_feature (884)..(884): n is a, c, g, or t
  misc_feature (886)..(886): n is a, c, g, or t
  misc_feature (890)..(890): n is a, c, g, or t
  misc_feature (904)..(904): n is a, c, g, or t
  misc_feature (909)..(909): n is a, c, g, or t
  misc_feature (918)..(918): n is a, c, g, or t
  misc_feature (925)..(925): n is a, c, g, or t
  misc_feature (937)..(938): n is a, c, g, or t
  misc_feature (945)..(945): n is a, c, g, or t
  misc_feature (950)..(950): n is a, c, g, or t
  misc_feature (952)..(952): n is a, c, g, or t
aatagagaaattactatgagaggatcgcatcaccattcaccattcacggatcctatttagggtgacactatagaatcgtcgacccacgcgtccgcggacgcgtgggggacaaatgtaagcaccacatatatcacatgccctgcagaccccaagaagacgctgggaattaaacttcctttccttgtcatgattatcaaaaacctgaagaagtattttaccttcgaagtgcaggtactagatgacaagaatgtgcgtcgtcgctttcgggcaagtaactaccagagcaccacccgggtcaaacccttcatctgcaccatgcccatgcggctggatgacggctggaaccagattcagttcaacttgctagacttcacacggcgagcatacggcaccaattacatcgagaccctcagagtgcagatccatgcaaattgtcgcatccgacgggtttacttctcagacagactctactcagaagatgagctgccggcagagttcaaactgtatctcccagttcagaacaaggcaaagcaataactggaattgtgactcgagggatagacccctggatgtgactcttctttttaaaaggaaactatgtggaggacgatgcaaaaacatatttatcttagtttgctctgctgtagttctgttanttatacttggngntgcttgncatggacaccggtgaacatgccgtaactctgtgactgcattgtaagtgcagtggggggtaagcagtnctgngantggcgcatgaacgctggaacttantcccccccctgccccantgnggggggaaanaccctttnccntgaacttncnnnaatnaaagntgggccntaangnaatcccnaacaaatatttcntnccnggngggttantnccanggttttaaaaaatnaaccnaaaaaaaangggaaanggcggggggccnnaaccccnaaaancngggaaaaaggaaaaaaagggggaaa

SEQ ID NO: 413 - DNA, 1153 bp, Homo Sapiens
  misc_feature (1)..(1): n is a, c, g, or t
  misc_feature (956)..(956): n is a, c, g, or t
  misc_feature (988)..(988): n is a, c, g, or t
  misc_feature (995)..(995): n is a, c, g, or t
  misc_feature (1020)..(1020): n is a, c, g, or t
  misc_feature (1024)..(1024): n is a, c, g, or t
  misc_feature (1034)..(1035): n is a, c, g, or t
  misc_feature (1052)..(1052): n is a, c, g, or t
  misc_feature (1072)..(1072): n is a, c, g, or t
  misc_feature (1078)..(1078): n is a, c, g, or t
  misc_feature (1092)..(1092): n is a, c, g, or t
  misc_feature (1106)..(1106): n is a, c, g, or t
  misc_feature (1115)..(1115): n is a, c, g, or t
  misc_feature (1122)..(1122): n is a, c, g, or t
  misc_feature (1124)..(1124): n is a, c, g, or t
  misc_feature (1129)..(1129): n is a, c, g, or t
  misc_feature (1133)..(1133): n is a, c, g, or t
  misc_feature (1135)..(1135): n is a, c, g, or t
  misc_feature (1138)..(1138): n is a, c, g, or t
  misc_feature (1142)..(1142): n is a, c, g, or t
  misc_feature (1148)..(1148): n is a, c, g, or t
  misc_feature (1150)..(1151): n is a, c, g, or t
naatagagaaattactatgagaggatcgcatcaccatcaccatcacggatcctatttaggtgacactatagaatcgtcgacccacgcgtccgggccgcgggatgctgggcggcgtcaggtaaccatggagaaagagctgcggagcaccattcttttcaatgcctacaaaaaggagatatttaccaccaacaatggctacaaatccatgcagaaaaaacttcggagtaattggaagattcagagcttaaaagatgaaatcacatctgagaagttaaatggagtaaaactgtggattacagctgggccaagggaaaaatttactgcagctgagtttgaaatcctgaagaaatatcttgacactggtggagatgtctttgtgatgctaggagaaggtggagaatccagatttgacaccaatattaactttttactagaagaatatggaatcatggttaataatgatgctgtggttagaaatgtatatcacaaatatttccatcctaaagaagctctagtttccagtggagtcttgaacagggaaattagccgagctgcaggaaaggctgtgcctgggatcattgatgaggaaagcagtggaaacaatgcccaggctctcacctttgtgtatccttttggtgccacattgagtgtcatgaaaccagcagtggcggttctgtctacaggttctgtctgcttcccacttaacagacccattttggctttctatcactcaaagaaccaaggtgggaagctggcagtgcttggttcatgtcacatgttcagtgatcaatatttggacaaagaagaaaacagcaaaatcatggatgttgttttccagtggctcacgacaggagacatccacctaaaccagattgatgctgaggacccagagatttctgactacatgatgctgccctacacagccaccctatcaagcggaatcgagagtgtctccnggagagtgatgagatcccaagggactttaccnccctctncgacctgtccatcttccagctgganaccncctccttccnnagcgtcatcgaggctcncgaccagctaatgtgaaacntgaacnctccgctcatccanccccgtttgaaacnccctgccanccttcancnggggntttncnccngttnccgggntnncc

SEQ ID NO: 414 - DNA, 1177 bp, Homo Sapiens
  misc_feature (878)..(878): n is a, c, g, or t
  misc_feature (890)..(890): n is a, c, g, or t
  misc_feature (911)..(911): n is a, c, g, or t
  misc_feature (921)..(921): n is a, c, g, or t
  misc_feature (923)..(923): n is a, c, g, or t
  misc_feature (935)..(935): n is a, c, g, or t
  misc_feature (948)..(948): n is a, c, g, or t
  misc_feature (962)..(962): n is a, c, g, or t
  misc_feature (980)..(980): n is a, c, g, or t
  misc_feature (994)..(994): n is a, c, g, or t
  misc_feature (998)..(998): n is a, c, g, or t
  misc_feature (1019)..(1019): n is a, c, g, or t
  misc_feature (1022)..(1022): n is a, c, g, or t
  misc_feature (1042)..(1042): n is a, c, g, or t
  misc_feature (1047)..(1047): n is a, c, g, or t
  misc_feature (1050)..(1050): n is a, c, g, or t
  misc_feature (1065)..(1065): n is a, c, g, or t
  misc_feature (1071)..(1071): n is a, c, g, or t
  misc_feature (1096)..(1096): n is a, c, g, or t
  misc_feature (1099)..(1100): n is a, c, g, or t
  misc_feature (1106)..(1106): n is a, c, g, or t
  misc_feature (1109)..(1109): n is a, c, g, or t
  misc_feature (1116)..(1116): n is a, c, g, or t
  misc_feature (1118)..(1118): n is a, c, g, or t
  misc_feature (1124)..(1124): n is a, c, g, or t
  misc_feature (1130)..(1130): n is a, c, g, or t
  misc_feature (1146)..(1146): n is a, c, g, or t
  misc_feature (1149)..(1150): n is a, c, g, or t
  misc_feature (1153)..(1153): n is a, c, g, or t
  misc_feature (1156)..(1156): n is a, c, g, or t
  misc_feature (1159)..(1159): n is a, c, g, or t
  misc_feature (1163)..(1163): n is a, c, g, or t
  misc_feature (1171)..(1171): n is a, c, g, or t
tagagaaattactatgagaggatcgcatcaccatcaccatcacggatcctatttaggtgacactatagaatcgtcgacccacgcgtccgcagagaaagaggaagaaaaccaggagaatttggattgggtgcctctcaccacactgtcacactgcaagtcactgaggacaatgacagcaatcagtcgctacatggagctgaccatcgagcctgtgcagcaggcaggctgcagtgccaccaggctgccaggtgacgggcagacgagcgccggagatgcgtccctgcaggaccccccgtcgtaccctcccgttcaggtcatccgggcccgggtgtcttccggcagctcctctgaggtctcctccatcaactccgacctggagcagaagtattgggaggccctaaactcggagcagtgggaccctgaagatgtgaacctcgaaggcagcaaagaaaatgtggagctactgggatcccaggtgcaccaggactctgtgaggacagcacacctgagtgatgatgattaacaccttctggagccagctcatcagctcagagcccagggtcaggagttcgttcagtaacgcagcgggaatcaatctgcactgacaccgcggcaggaactgaagctgccctggcaagtgaggaaccaggagccgtcactgagtgtggctgggctacatcatagctcatcacggagctacgactttgggtactgcggacagacctggataggcccagcattcgttctgaagatcacagttcacagaagtttttgcttcgtaaagataatccaaaggatctcagacccgctcttccttttcccttcattcccttgagagtcagccatgaacggaatacctgctaggttccaggaatganctcacctaacanatagcaaatgtgtctggttanatctcagcanancccattctgcanacctggctgaacnaaatgaaaggtggncctgtgctggggggcctngggtcacacacagnaacnaaacctggcttccccccccantcnccccttgggttatctgctgnaattntcnaaggactgtgtggcnaccaantgctgggaatcctgacctgcaaaanaannaattgntcnggtacananttctcnacttgnaagggtggccttaagnggnnttnagnaangggntttttttnggaata

SEQ ID NO: 415 - DNA, 850 bp, Homo Sapiens
  misc_feature (823)..(823): n is a, c, g, or t
  misc_feature (828)..(850): n is a, c, g, or t
tagagagaattactatgagaggatcgcatcaccatcaccatcacggatcctatttaggtgacactatagaatcgtcgacccacgcgtccggacctacagccgcccgggagaagatggctgccccagcagtgtccgggctctcccggcaggtgcgatgcttcagtacctctgtggtcagaccatttgccaagcttgtgaggcctcctgttcaggtatacggtattgaaggtcgctatgccacagctctttattctgctgcatcaaaacagaataagctggagcaagtagaaaaggagttgttgagagtagcacaaatcctgaaggaacccaaagtggctgcttctgttttgaatccctatgtgaagcgttccattaaagtgaaaagcctaaatgacatcacagcaaaagagaggttctctcccctcactaccaacctgatcaatttgcttgctgaaaatggtcgattaagcaatacccaaggagtcgtttctgccttttctaccatgatgagtgtccatcgcggagaggtaccttgcacagtgacctctgcatctcctttagaagaagccacactctctgaattaaaaactgtcctcaagagcttcctaagtcaaggccaagtattgaaattggaggctaagactgatccgtcaatcttgggtggaatgattgtgcgcattggcgagaaatatgttgacatgtctgtcaagaccaagattcagaagctgggcagggctatgcgggagattgtctaaaagtgttggttttctgccatcagtgaaaattcttaaacttggagcaacaataaaaagcttccagaacngatcnnnnnnnnnnnnnnnnnnnnnnn

SEQ ID NO: 416 - DNA, 1073 bp, Homo Sapiens
  misc_feature (5)..(5): n is a, c, g, or t
  misc_feature (7)..(8): n is a, c, g, or t
  misc_feature (13)..(13): n is a, c, g, or t
  misc_feature (21)..(23): n is a, c, g, or t
  misc_feature (26)..(26): n is a, c, g, or t
  misc_feature (28)..(28): n is a, c, g, or t
  misc_feature (33)..(33): n is a, c, g, or t
  misc_feature (38)..(38): n is a, c, g, or t
  misc_feature (53)..(53): n is a, c, g, or t
  misc_feature (55)..(55): n is a, c, g, or t
  misc_feature (58)..(58): n is a, c, g, or t
  misc_feature (62)..(62): n is a, c, g, or t
  misc_feature (92)..(92): n is a, c, g, or t
  misc_feature (100)..(100): n is a, c, g, or t
  misc_feature (112)..(112): n is a, c, g, or t
  misc_feature (115)..(115): n is a, c, g, or t
  misc_feature (595)..(595): n is a, c, g, or t
  misc_feature (740)..(740): n is a, c, g, or t
  misc_feature (814)..(814): n is a, c, g, or t
  misc_feature (823)..(823): n is a, c, g, or t
  misc_feature (886)..(886): n is a, c, g, or t
  misc_feature (896)..(896): n is a, c, g, or t
  misc_feature (900)..(900): n is a, c, g, or t
  misc_feature (902)..(902): n is a, c, g, or t
  misc_feature (904)..(904): n is a, c, g, or t
  misc_feature (916)..(916): n is a, c, g, or t
  misc_feature (922)..(922): n is a, c, g, or t
  misc_feature (925)..(925): n is a, c, g, or t
  misc_feature (931)..(931): n is a, c, g, or t
  misc_feature (938)..(939): n is a, c, g, or t
  misc_feature (947)..(947): n is a, c, g, or t
  misc_feature (965)..(965): n is a, c, g, or t
  misc_feature (975)..(975): n is a, c, g, or t
  misc_feature (980)..(980): n is a, c, g, or t
  misc_feature (987)..(987): n is a, c, g, or t
  misc_feature (990)..(990): n is a, c, g, or t
  misc_feature (998)..(998): n is a, c, g, or t
  misc_feature (1004)..(1004): n is a, c, g, or t
  misc_feature (1011)..(1012): n is a, c, g, or t
  misc_feature (1014)..(1014): n is a, c, g, or t
  misc_feature (1027)..(1027): n is a, c, g, or t
  misc_feature (1034)..(1034): n is a, c, g, or t
  misc_feature (1036)..(1036): n is a, c, g, or t
  misc_feature (1038)..(1038): n is a, c, g, or t
  misc_feature (1053)..(1053): n is a, c, g, or t
  misc_feature (1056)..(1056): n is a, c, g, or t
  misc_feature (1068)..(1068): n is a, c, g, or t
aggantnnaacanaattagcnnngantnggatngcgancctcgtcatccactnangtnatcnctatttaggggtgacatgtaatattaatcnttaacccncgtcgctccggnagnaaggtagcccgcagtaggaacatggcgctgctctgggggctcctggtgctcagctggtcctgcctgcaaggcccctgctccgtgttctcccctgtgagcgccatggagcccttgggccggcagctaactagcgggccgaaccaggagcaggtgtccccacttaccctcctcaagttgggcaaccaggagcctggtggccagactgccctgaagagtcccccaggagtctgcagcagagaccccaccccagagcagacccacaggctggcccgggccatgatggccttcactgccgacctgttctccctggtggctcaaacgtccacctgccccaacctcatcctgtcacccctgagtgtggccctggcgctgtctcacctggcactaggtgctcagaaccacacgttgcagaggctgcaacaggtgctgcacgcaggctcagggccctgcctcccccatctgctgagccgcctctgccangacctgggccccggcgcgttccgactggctgccaggatgtacctgcagaaaggatttcccatcaaagaagatttcctggaacaatccgaacagctatttggggcaaagcccgtgagcctgacgggaaagcaggaagatgacctgncaaacatcaaccaatgggtgaaaggaggccacggaggggaaagattcaggaattcctctctgggctgccggaanacaccgtgnttgcttctcctcaacgccatccactttccagggttttctggaggaacaaagttttgacccgangccttacccnaganananttccttccaccntggaanaancatttncacggtnncccgtggnaaatgatgcaaggccccncacgtacccnctgcnctggttnttngctggaancaaccntgaaaanncnaaggtcccccttnggttgtncnancaaggcttggccctnaanttggaaggtggnaaaag

SEQ ID NO: 417 - DNA, 1179 bp, Homo Sapiens
  misc_feature (932)..(932): n is a, c, g, or t
  misc_feature (935)..(935): n is a, c, g, or t
  misc_feature (965)..(965): n is a, c, g, or t
  misc_feature (1001)..(1001): n is a, c, g, or t
  misc_feature (1013)..(1013): n is a, c, g, or t
  misc_feature (1031)..(1031): n is a, c, g, or t
  misc_feature (1034)..(1034): n is a, c, g, or t
  misc_feature (1041)..(1041): n is a, c, g, or t
  misc_feature (1054)..(1054): n is a, c, g, or t
  misc_feature (1060)..(1061): n is a, c, g, or t
  misc_feature (1071)..(1071): n is a, c, g, or t
  misc_feature (1077)..(1077): n is a, c, g, or t
  misc_feature (1087)..(1087): n is a, c, g, or t
  misc_feature (1127)..(1128): n is a, c, g, or t
  misc_feature (1131)..(1131): n is a, c, g, or t
  misc_feature (1146)..(1146): n is a, c, g, or t
  misc_feature (1156)..(1156): n is a, c, g, or t
  misc_feature (1158)..(1158): n is a, c, g, or t
  misc_feature (1160)..(1160): n is a, c, g, or t
  misc_feature (1166)..(1166): n is a, c, g, or t
  misc_feature (1169)..(1169): n is a, c, g, or t
  misc_feature (1171)..(1171): n is a, c, g, or t
  misc_feature (1176)..(1177): n is a, c, g, or t
catagagaaattactatgagaggatcgcatcaccatcaccatcacggatcctatttaggtgacactatagaatcgtcgacccacgcgtccggccgggcgcctcttgcaatggagacggtcatttcttcagatagctccccagctgtggaaaatgagcatcctcaagagaccccagaatccaacaatagcgtgtatacttccttcatgaagtctcatcgctgctatgacctgattcccacaagctccaaattggttgtatttgatacgtccctgcaggtgaagaaagctttttttgctttggtgactaacggtgtacgagctgcccctttatgggatagtaagaagcaaagttttgtgggcatgctgaccatcactgatttcatcaatatcctgcaccgctactataaatcagccttggtacagatctatgagctagaagaacacaagatagaaacttggagagaggtgtatctccaggactcctttaaaccgcttgtctgcatttctcctaatgccagcttgtttgatgctgtctcttcattaattcggaacaagatccacaggctgccagttattgacccagaatcaggcaatactttgtacatcctcacccacaagcgcattctgaagttcctcaaattgtttatcactgagttccccaagccagagttcatgtccaagtctctggaagagctacagattggcacctatgccaatattgctatggttcgcactaccacccccgtctatgtggctctggggatttttgtacagcatcgagtctcagccctgccagtggtggatgaaaaggggcgtgtggtggacatctactccaagtttgatgttatcaatctggcagcagaaaagacctacaacaacctaaatgtatctgtgactaagccttgcaacatcgatcacattactttgagggngtnctcaagtgctacctgcatgaaactctgganaccatcatcaacaggctagtggaaaccaaaggttcnccgacttgtaangggggaagaaaatgatgnggncaaaggnaattgtatcctgnctgaanntcctgcaggncctggngctcaaaggnggaaaaaaaaaaccctgaactggggaaagggtccagcacnnccngggaaatgcccaccncctgccggcngnanccttgnggnanccaannaa

SEQ ID NO: 418 - DNA, 1096 bp, Homo Sapiens
  misc_feature (1)..(1): n is a, c, g, or t
  misc_feature (789)..(789): n is a, c, g, or t
  misc_feature (794)..(794): n is a, c, g, or t
  misc_feature (813)..(813): n is a, c, g, or t
  misc_feature (860)..(860): n is a, c, g, or t
  misc_feature (872)..(872): n is a, c, g, or t
  misc_feature (881)..(881): n is a, c, g, or t
  misc_feature (932)..(932): n is a, c, g, or t
  misc_feature (952)..(952): n is a, c, g, or t
  misc_feature (970)..(970): n is a, c, g, or t
  misc_feature (984)..(984): n is a, c, g, or t
  misc_feature (993)..(993): n is a, c, g, or t
  misc_feature (1009)..(1009): n is a, c, g, or t
  misc_feature (1016)..(1016): n is a, c, g, or t
  misc_feature (1026)..(1026): n is a, c, g, or t
  misc_feature (1028)..(1029): n is a, c, g, or t
  misc_feature (1033)..(1033): n is a, c, g, or t
  misc_feature (1038)..(1038): n is a, c, g, or t
  misc_feature (1044)..(1044): n is a, c, g, or t
  misc_feature (1050)..(1050): n is a, c, g, or t
  misc_feature (1054)..(1054): n is a, c, g, or t
  misc_feature (1061)..(1061): n is a, c, g, or t
  misc_feature (1071)..(1071): n is a, c, g, or t
  misc_feature (1075)..(1075): n is a, c, g, or t
  misc_feature (1079)..(1080): n is a, c, g, or t
  misc_feature (1085)..(1085): n is a, c, g, or t
  misc_feature (1092)..(1092): n is a, c, g, or t
  misc_feature (1096)..(1096): n is a, c, g, or t
naattagagaaattactatgagaggatcgcatcaccatcaccatcacggatcctatttaggtgacactatagaatcgtcgacccacgcgtccgaggcagtcagcgaggcccaggagaaattgacagaatccaaccagaagctggggctgctgcgggaggctctggagcggagacttggggagctgcccgccgaccaccccaaggggcggctgctgcgagaagagctcgctgcggcctcctccgctgccttcagcacccgcctggccgggccctttcccgccacgcactacagcaccctgtgcaagcccgcgccgctcacagggaccctggaggtacgagtggtgggctgcagagacctcccagagaccatcccgtggaaccctaccccctcaatggggggacctgggaccccagacagccgcccccccttcctgagccgcccagcccggggcctttacagccgaagcggaagcctcagtggccggagcagcctcaaagcagaagccgagaacaccagtcaccttccgcaaccctgtcattgagaggattcctcggctccgacggcagaagaaaattttctccaagcagcaagggaaggcgttccagcgtgctaggcagatgaacatcgatgtcgccacgtgggtgcggctgctccggaggctcatccccaatgccacgggcacaggcacctttagccctggggcttctccaggatccgaggcccggaccacgggtgacatatcggtggagaagctgaacctcggcactgactcggacagctcacctcanaaganctcgcgggatcctccttcnagcccatcgagcctgagctccccatccaggaatccactgctcccganctgccttcgganacccagganacccaggccccgccctgtgcagccctctgagaaagtcacctctgaccctcnaaaattttcaagttcctggnggtgctggggccggggtnattttgggaaaggngctcctttnccaaattccggcccantgggganctgttccccntnnaggnttttnaaaaangggaantttntggcccnaaaaaagtgnaaancttnnttttnaaaaacngaan

SEQ ID NO: 419 - DNA, 1225 bp, Homo Sapiens
  misc_feature (3)..(3): n is a, c, g, or t
  misc_feature (922)..(922): n is a, c, g, or t
  misc_feature (930)..(930): n is a, c, g, or t
  misc_feature (952)..(952): n is a, c, g, or t
  misc_feature (979)..(979): n is a, c, g, or t
  misc_feature (991)..(991): n is a, c, g, or t
  misc_feature (997)..(997): n is a, c, g, or t
  misc_feature (1003)..(1003): n is a, c, g, or t
  misc_feature (1007)..(1007): n is a, c, g, or t
  misc_feature (1017)..(1017): n is a, c, g, or t
  misc_feature (1034)..(1034): n is a, c, g, or t
  misc_feature (1037)..(1037): n is a, c, g, or t
  misc_feature (1069)..(1069): n is a, c, g, or t
  misc_feature (1075)..(1075): n is a, c, g, or t
  misc_feature (1078)..(1078): n is a, c, g, or t
  misc_feature (1091)..(1091): n is a, c, g, or t
  misc_feature (1095)..(1095): n is a, c, g, or t
  misc_feature (1098)..(1098): n is a, c, g, or t
  misc_feature (1110)..(1110): n is a, c, g, or t
  misc_feature (1112)..(1112): n is a, c, g, or t
  misc_feature (1126)..(1126): n is a, c, g, or t
  misc_feature (1134)..(1134): n is a, c, g, or t
  misc_feature (1140)..(1140): n is a, c, g, or t
  misc_feature (1145)..(1145): n is a, c, g, or t
  misc_feature (1152)..(1152): n is a, c, g, or t
  misc_feature (1155)..(1155): n is a, c, g, or t
  misc_feature (1171)..(1171): n is a, c, g, or t
  misc_feature (1178)..(1179): n is a, c, g, or t
  misc_feature (1186)..(1186): n is a, c, g, or t
  misc_feature (1190)..(1190): n is a, c, g, or t
  misc_feature (1198)..(1199): n is a, c, g, or t
  misc_feature (1202)..(1202): n is a, c, g, or t
  misc_feature (1207)..(1207): n is a, c, g, or t
  misc_feature (1209)..(1209): n is a, c, g, or t
  misc_feature (1216)..(1217): n is a, c, g, or t
  misc_feature (1219)..(1220): n is a, c, g, or t
ctntagagaaattactatgagaggatcgcatcaccatcaccatcacggatcctatttaggtgacactatagaatcgtcgacccacgcgtccgcccacgcgtccgagtgtctgaaggatggtgctggggatgtggcctttgtcaagcactcgactatatttgagaacttggcaaacaaggctgacagggaccagtatgagctgctttgcctggacaacacccggaagccggtagatgaatacaaggactgccacttggcccaggtcccttctcataccgtcgtggcccgaagtatgggcggcaaggaggacttgatctgggagcttctcaaccaggcccaggaacattttggcaaagacaaatcaaaagaattccaactattcagctctcctcatgggaaggacctgctgtttaaggactctgcccacgggtttttaaaagtcccccccaggatggatgccaagatgtacctgggctatgagtatgtcactgccatccggaatctacgggaaggcacatgcccagaagccccaacagatgaatgcaagcctgtgaagtggtgtgcgctgagccaccacgagaggctcaagtgtgatgagtggagtgttaacagtgtagggaaaatagagtgtgtatcagcagagaccaccgaagactgcatcgccaagatcatgaatggagaagctgatgccatgagcttggatggagggtttgtctacatagcgggcaagtgtggtctggtgcctgtcttggcagaaaactacaataagagcgataattgtgaggatacaccagaggcagggtattttgctgtagcagtggtgaagaaaatcagcttctgacctcacctgggacaatctgaaaggcaagaagtcctgccatacggcagttggcaaaaccgctggctggaaaattcccatggncctgctcnacaaaaaatcaaccccctgcanatttgatgaatttttcagtgaaggtgngcccctgggtcnaaaaanactccntctntgtaacctgngtttgggctcaggcctnaanctcctgtgaacccaacaaccaaaaaagggaanctacgnctncccgggccctttncagngtntggtttaaaaangnaatttggccctttngaaacccnaaactntcccnaaaaacnctngggaaaaaaaccccgntcctggnntaaaatntaangaaaaaannttnattgntntcccttnngnnccaaa

SEQ ID NO: 420 - DNA, 1267 bp, Homo Sapiens
  misc_feature (905)..(905): n is a, c, g, or t
  misc_feature (909)..(909): n is a, c, g, or t
  misc_feature (940)..(940): n is a, c, g, or t
  misc_feature (944)..(944): n is a, c, g, or t
  misc_feature (987)..(987): n is a, c, g, or t
  misc_feature (1003)..(1003): n is a, c, g, or t
  misc_feature (1013)..(1013): n is a, c, g, or t
  misc_feature (1044)..(1044): n is a, c, g, or t
  misc_feature (1049)..(1049): n is a, c, g, or t
  misc_feature (1055)..(1055): n is a, c, g, or t
  misc_feature (1066)..(1066): n is a, c, g, or t
  misc_feature (1079)..(1079): n is a, c, g, or t
  misc_feature (1096)..(1096): n is a, c, g, or t
  misc_feature (1098)..(1098): n is a, c, g, or t
  misc_feature (1106)..(1106): n is a, c, g, or t
  misc_feature (1127)..(1128): n is a, c, g, or t
  misc_feature (1130)..(1130): n is a, c, g, or t
  misc_feature (1137)..(1137): n is a, c, g, or t
  misc_feature (1145)..(1145): n is a, c, g, or t
  misc_feature (1156)..(1156): n is a, c, g, or t
  misc_feature (1158)..(1158): n is a, c, g, or t
  misc_feature (1167)..(1167): n is a, c, g, or t
  misc_feature (1174)..(1174): n is a, c, g, or t
  misc_feature (1207)..(1207): n is a, c, g, or t
  misc_feature (1213)..(1213): n is a, c, g, or t
  misc_feature (1220)..(1220): n is a, c, g, or t
  misc_feature (1230)..(1230): n is a, c, g, or t
  misc_feature (1233)..(1233): n is a, c, g, or t
  misc_feature (1238)..(1238): n is a, c, g, or t
  misc_feature (1242)..(1243): n is a, c, g, or t
  misc_feature (1250)..(1250): n is a, c, g, or t
  misc_feature (1252)..(1252): n is a, c, g, or t
  misc_feature (1258)..(1258): n is a, c, g, or t
  misc_feature (1263)..(1263): n is a, c, g, or t
tagagaaaattactatgagaggatcgcatcaccatcaccatcacggatcctatttaggtgacactatagaatcgtcgacccacgcgtccggcgccgcagagatcatggctgtcctctttttccacaccatgcgctacaagtcccaggacccccggaatccgcacaatgaccgctttgtgctctccaagggccatgcagctcccatcctctacgcggtctgggctgaagctggtttcctggccgaggcggagctgctgaacctgaggaagatcagctccgacttggacgggcacccggtcccgaaacaagctttcaccgacgtggccactggctccctgggccagggcctcggggccgcttgtgggatggcctacaccggcaaatacttcgacaaggccagctaccgagtctattgcttgctgggagacggggagctgtcagagggctctgtatgggaggccatggccttcgccagcatctataagctggacaaccttgtggccattctagacatcaatcgcctgggccagagtgacccggccccactgcagcaccagatggacatctaccagaagcggtgcgaggccttcggttggcatgccatcatcgtggatggacacagcgtggaggagctgtgcaaggcctttggccaggccaagcaccagccaacagccatcattgccaagaccttcaagggccgagggatcacgggggtagaagataaggagtcttggcatgggaagcccctccccaaaaacatggctgagcagatcatccaggagatctacagccagatccagagcaaaaagaagatcctggcaacccctccacaggaggacgcaccctcagtggacattgccaacatccgcatgcccagcctgcccagctacaaagttggggacaanatanccacccgcaaggcctacgggcaggcactggncaanctgggccatgccagtgaccgcatcatccccctggatggggaancccaaaattccacctnctcggaaatnttcaaaaagaacacccggaaccgcttcatcnagtgntaaatngctgaaaaaanatggtgaacatcncggggggctggcccccncnaaaggaangggcccttttgcaaacttttnnanccttttnccccgggnctttaacaaantnccatggccncatttcnaaaaaaaataaccttggggtccatgggggtttncttggnaaaaggncccccaaagnccnaaaantggnnttttggnanccccanaaagntttt

SEQ ID NO: 421 - DNA, 962 bp, Homo Sapiens
  misc_feature (1)..(1): n is a, c, g, or t
  misc_feature (754)..(754): n is a, c, g, or t
  misc_feature (757)..(757): n is a, c, g, or t
  misc_feature (784)..(784): n is a, c, g, or t
  misc_feature (789)..(789): n is a, c, g, or t
  misc_feature (792)..(792): n is a, c, g, or t
  misc_feature (795)..(795): n is a, c, g, or t
  misc_feature (797)..(797): n is a, c, g, or t
  misc_feature (834)..(834): n is a, c, g, or t
  misc_feature (836)..(836): n is a, c, g, or t
  misc_feature (842)..(842): n is a, c, g, or t
  misc_feature (852)..(852): n is a, c, g, or t
  misc_feature (864)..(864): n is a, c, g, or t
  misc_feature (866)..(866): n is a, c, g, or t
  misc_feature (872)..(873): n is a, c, g, or t
  misc_feature (880)..(881): n is a, c, g, or t
  misc_feature (886)..(886): n is a, c, g, or t
  misc_feature (893)..(893): n is a, c, g, or t
  misc_feature (897)..(897): n is a, c, g, or t
  misc_feature (899)..(899): n is a, c, g, or t
  misc_feature (903)..(903): n is a, c, g, or t
  misc_feature (915)..(915): n is a, c, g, or t
  misc_feature (917)..(917): n is a, c, g, or t
  misc_feature (921)..(922): n is a, c, g, or t
  misc_feature (936)..(936): n is a, c, g, or t
  misc_feature (941)..(941): n is a, c, g, or t
  misc_feature (945)..(946): n is a, c, g, or t
  misc_feature (953)..(953): n is a, c, g, or t
  misc_feature (962)..(962): n is a, c, g, or t
nttagagaaattactatgagaggatcgcatcaccatcaccatcacggtatcctatttaggtgacactatagaatcgtcgacccacgcgtccgcgagcgaggccggccgcgccatgcacctgatgaagaagcgggagaagcagcgcgagcagatggagcagatgaagcagcgcatcgcggaggagaacatcatgaaatccaacattgacaagaagttctctgcgcactacgacgcggtggaggcagagctcaagtccagcaccgtgggtctcgtgaccctgaatgacatgaaggccaagcaggaggctctggtgaaggagcgggagaagcagctggccaagaaggagcagtccaaggagctgcagatgaagctggagaagcttcgagagaaggagcgtaagaaggaagccaagcggaagatctccagcctgtccttcaccctggaggaggaagaagagggaggcgaggaggaagaggaggcggccatgtatgaggaggagatggaaagggaagagatcaccacgaagaagagaaaactggggaagaacccagacgttgacacaagcttcttgcctgatcgagaccgtgaggaggaggagaatcggcttcgggaagagctgcggcaggagtgggaagccaagcaggagaagatcaagagtgaggagatcgagatcaccttcagctactgggatggctctgggcaccggcggacagtcaagatgagaaagggcaacaccatgcagcagttcctgcanaangcgctcgagatccttcggaaagacttncattnagnctnangttcccaggggggtggagcagctccatgttcttccangnaagganttgatttttnccttcacccctncncaacanntttaccnnttttnttttttncctntnttanccggtacacaantnaaanngtcccccaccttancattncctnntctttcnttctttttn

SEQ ID NO: 422 - DNA, 1130 bp, Homo Sapiens
  misc_feature (748)..(748): n is a, c, g, or t
  misc_feature (807)..(807): n is a, c, g, or t
  misc_feature (840)..(840): n is a, c, g, or t
  misc_feature (843)..(843): n is a, c, g, or t
  misc_feature (910)..(910): n is a, c, g, or t
  misc_feature (920)..(920): n is a, c, g, or t
  misc_feature (928)..(928): n is a, c, g, or t
  misc_feature (958)..(958): n is a, c, g, or t
  misc_feature (1001)..(1001): n is a, c, g, or t
  misc_feature (1013)..(1014): n is a, c, g, or t
  misc_feature (1020)..(1020): n is a, c, g, or t
  misc_feature (1046)..(1046): n is a, c, g, or t
  misc_feature (1054)..(1054): n is a, c, g, or t
  misc_feature (1057)..(1057): n is a, c, g, or t
  misc_feature (1060)..(1060): n is a, c, g, or t
  misc_feature (1065)..(1065): n is a, c, g, or t
  misc_feature (1072)..(1072): n is a, c, g, or t
  misc_feature (1075)..(1075): n is a, c, g, or t
  misc_feature (1086)..(1086): n is a, c, g, or t
  misc_feature (1089)..(1089): n is a, c, g, or t
  misc_feature (1096)..(1097): n is a, c, g, or t
  misc_feature (1100)..(1101): n is a, c, g, or t
  misc_feature (1103)..(1103): n is a, c, g, or t
  misc_feature (1113)..(1113): n is a, c, g, or t
  misc_feature (1118)..(1119): n is a, c, g, or t
  misc_feature (1121)..(1121): n is a, c, g, or t
tagagaaattactatgagaggatcgcatcaccatcaccatcacggatcctatttaggtgacactatagaatcgtcgacccacgcgtccggccactgcacctccctgatggttgggctgatccggcagggctacgcctgcgaggtgtgttcctttgcttgccacgtgtcctgcaaagacggtgccccccaggtgtgcccaatacctcccgagcagtccaagaggcctctgggcgtggacgtgcagcgaggcatcggaacagcctacaaaggccatgtcaaggtcccaaagcccacgggggtgaagaagggatggcagcgcgcatatgcagtcgtctgtgactgcaagctcttcctgtatgatctgcctgaaggaaaatccacccagcctggtgtcattgcgagccaagtcttggatctcagagatgacgagttttccgtgagctcagtcctggcctcagatgtcattcatgctacacccgagatattccatgtatattcagggtgacggcctctctcttaggtgcaccttctaagaccagctcgctgctcattctgacagaaaatgagaatgaaaagaggaagtgggttgggattctagaaggactccagtccatccttcataaaaaccggctgaggaatcaggtcgtgcatgttcccttggaagcctacgacagctcgctgcctctcatcaaggccatcctgacagctgccatcgtggatgcagacaggattgcagtcggcctaaaanaagggctctatgtcatagaggtcacccgagatgtgatcgtccgtgccgctgactgtaanaaggtacaccagatcgagcttgctcccaggganaanatcgtaatcctcctctgtggccggaaccaccatgtgcacctctatccgtggtcgtcccttgatggancggaaagcancttttganatcaagcttccggaaaccaaaggctgccanctcatggccacggccacactcaaaagaactctgggcacctgcntgtttggggccnngaaaanggctgaatcctttgctatgaaatccnaaaaaacnaanccnttccnaaaaaanttnaatgaaatttnggnttcccgnnacnngnaatgcctggnggtgnntnaggaaaagg

SEQ ID NO: 423 - DNA, 1222 bp, Homo Sapiens
  misc_feature (945)..(945): n is a, c, g, or t
  misc_feature (966)..(966): n is a, c, g, or t
  misc_feature (982)..(982): n is a, c, g, or t
  misc_feature (1007)..(1007): n is a, c, g, or t
  misc_feature (1017)..(1017): n is a, c, g, or t
  misc_feature (1025)..(1027): n is a, c, g, or t
  misc_feature (1043)..(1043): n is a, c, g, or t
  misc_feature (1045)..(1045): n is a, c, g, or t
  misc_feature (1051)..(1051): n is a, c, g, or t
  misc_feature (1057)..(1057): n is a, c, g, or t
  misc_feature (1083)..(1083): n is a, c, g, or t
  misc_feature (1085)..(1085): n is a, c, g, or t
  misc_feature (1089)..(1089): n is a, c, g, or t
  misc_feature (1094)..(1094): n is a, c, g, or t
  misc_feature (1115)..(1115): n is a, c, g, or t
  misc_feature (1118)..(1118): n is a, c, g, or t
  misc_feature (1130)..(1130): n is a, c, g, or t
  misc_feature (1134)..(1134): n is a, c, g, or t
  misc_feature (1151)..(1152): n is a, c, g, or t
  misc_feature (1155)..(1155): n is a, c, g, or t
  misc_feature (1157)..(1157): n is a, c, g, or t
  misc_feature (1161)..(1161): n is a, c, g, or t
  misc_feature (1163)..(1164): n is a, c, g, or t
  misc_feature (1168)..(1168): n is a, c, g, or t
  misc_feature (1194)..(1194): n is a, c, g, or t
  misc_feature (1204)..(1204): n is a, c, g, or t
  misc_feature (1208)..(1208): n is a, c, g, or t
  misc_feature (1215)..(1216): n is a, c, g, or t
  misc_feature (1218)..(1219): n is a, c, g, or t
tagagaaattactatgagaggatcgcatcaccatcaccatcacggatcctatttaggtgacactatagaatcgtcgacccacgcgtccgcccagccagcgcccgcgatgactgccactctccgcccctacctgagtgccgtgcgggccacattgcaggctgccctctgcctggagaacttctcctcccaggttgtggaacgacacaacaagccggaagtggaagtcaggagtagcaaagagctcctgttacaacctgtgaccatcagcaggaatgagaaggaaaaggttctgattgagggctccatcaactctgtccgggtcagcattgctgtgaaacaggctgatgagatcgagaagattttgtgccacaagttcatgcgcttcatgatgatgcgagcagagaacttctttatccttcgaaggaagcctgtggaggggtatgatatcagctttctgatcaccaacttccacacagagcagatgtacaaacacaagttggtggactttgtgatccacttcatggaggagattgacaaggagatcagtgagatgaagctgtcagtcaatgcccgtgcccgcattgtggctgaagagttccttaagaatttttaaaccatctggctggatctcgtggccttccccctcagactacccatgtctccacgaaggcgtcctggagtcactccccgagcagcgcggcggcggcagggagttgggttggggtgggcatttgatgcgggaggtgggtggtgtgcttgctagctgggcaagaaagcagcagtggacctgccccaaggccacacgtgcctggtcaggctggcttctgatgttcagtcccctgggccgggacagattttttttaacgtcttgaaacttaaactctgtgcttgtaggatactgtaacctttttgtcttttttttttttttttttttttaaacctccncctccagtggctgtgactggnccccagtgattaaacnttattggttgctgtgggtctgggcnggccctgganccaaaagnnnacttatttttttcccncnatgccncccccngggggggagggaggggaggtttcaancnccantttcncccttgccctttattcccaanccncttggccccaanaaantgtgggaacccttgccnnctncngaantnngccnaaaaaggcccccccccctggttgggnaaaggccaantggngaccccnntnngcc

SEQ ID NO: 424 - DNA, 1179 bp, Homo Sapiens
  misc_feature (880)..(880): n is a, c, g, or t
  misc_feature (897)..(897): n is a, c, g, or t
  misc_feature (961)..(961): n is a, c, g, or t
  misc_feature (966)..(966): n is a, c, g, or t
  misc_feature (974)..(974): n is a, c, g, or t
  misc_feature (999)..(999): n is a, c, g, or t
  misc_feature (1016)..(1016): n is a, c, g, or t
  misc_feature (1022)..(1022): n is a, c, g, or t
  misc_feature (1049)..(1049): n is a, c, g, or t
  misc_feature (1073)..(1073): n is a, c, g, or t
  misc_feature (1083)..(1083): n is a, c, g, or t
  misc_feature (1085)..(1085): n is a, c, g, or t
  misc_feature (1101)..(1101): n is a, c, g, or t
  misc_feature (1105)..(1105): n is a, c, g, or t
  misc_feature (1109)..(1109): n is a, c, g, or t
  misc_feature (1116)..(1117): n is a, c, g, or t
  misc_feature (1121)..(1121): n is a, c, g, or t
  misc_feature (1125)..(1125): n is a, c, g, or t
  misc_feature (1138)..(1138): n is a, c, g, or t
  misc_feature (1144)..(1144): n is a, c, g, or t
  misc_feature (1150)..(1150): n is a, c, g, or t
  misc_feature (1163)..(1164): n is a, c, g, or t
ttagagaaaattactatgagaggatcgcatcaccatcaccatcacggatcctatttaggtgacactatagaatcgtcgacccacgcgtccggaggaaggcggcatgccccagacggtgatcctcccgggccctgcgccctggggcttcaggctctcagggggcatagacttcaaccagcctttggtcatcaccaggattacaccaggaagcaaggcggcagctgccaacctgtgtcctggagatgtcatcctggctattgacggctttgggacagagtccatgactcatgctgatgcgcaggacaggattaaagcagcagctcaccagctgtgtctcaaaattgacaggggagaaactcacttatggtctccacaagtatctgaagatgggaaagcccatcctttcaaaatcaacttagaatcagaaccacaggaattcaaacccattggtaccgcgcacaacagaagggcccagccttttgttgcagctgcaaacattgatgacaaaagacaggtagtgagcgcttcctataactcgccaattgggctctattcaactagcaatatacaagatgcgcttcacggacagctgcggggtctcattcctagctcacctcaaaacgagcccacagcctcggtgccccccgagtcggacgtgtaccggatgctccacgacaatcggaatgagcccacacagcctcgccagtcgggctccttcagagtgctccagggaatggtggacgatggctctgatgaccgtccggctggaacgcggagtgtgagagctccggtgacgaaagtccatggcggttcaggcggggcacagaggatgccgctctgtgacaaatgtgggagtggcatagttggtgctgtggtgaangcgcgggataagtaccnggcaccctgagtgcttcgtgtgtgccgactgcaacctcaacctcaagcaaaagggctacttctncatanaagggganctgtactgcgaaacccacccaagancccgcacaaagcccccnaaaggnctatgacccggtcactctgttatcccnaaacttaaattttctgcagggggnggaaggaagnangcacccacccaggggnattnaccnaaaaaannttcntggntttggccaaaaanatttgncaaatnttcactccaatcnnaagtcaaggttttaa

SEQ ID NO: 425 - DNA, 874 bp, Homo Sapiens
  misc_feature (850)..(850): n is a, c, g, or t
  misc_feature (852)..(874): n is a, c, g, or t
tagagaaattactatgagaggatcgcatcaccatcaccatcacggatcctatttaggtgacactatagaatcgtcgacccacgcgtccgctagccgtcgcttacctaggatgccgcgtggaagccgaagccgcacctcccgcatggcccctccggccagccgggcccctcagatgagagctgcacccaggccagcaccagtcgctcagccactagcagcggcacccccatctgcagttggctcttctgctgctgcgccccggcagccaggtctgatggcccagatggcaaccactgcagctggcgtggctgtgggctctgctgtggggcacacattgggtcacgccattactgggggcttcagtggaggaagtaatgctgagcctgcgaggcctgacatcacttaccaggagcctcagggaacccagccagcacagcagcagcagccttgcctctatgagatcaaacagtttctggagtgtgcccagaaccagggtgacatcaagctctgtgagggtttcaatgaggtgctgaaacagtgccgacttgcaaacggattggcctaatgaagaagttcaacctggagagatggaaaatcagctctcataactaagttaatttagtataaaaatagaattgatagtgagggtataaagtgtaaccatcagttaaacctctcctgtcattcctggcttccttgcttcagaattgaaatggaagtgggggtgtccctactctgtagaatctgggactgggcaaatgtttgtgtggcctccttaaactagctgttatgttatgattttattctttgtgagttaattagaataaagtcattttcttccaaaaaaaanannnnnnnnnnnnnnnnnnnnnnn

SEQ ID NO: 426 - DNA, 1179 bp, Homo Sapiens
  misc_feature (969)..(969): n is a, c, g, or t
  misc_feature (972)..(972): n is a, c, g, or t
  misc_feature (978)..(978): n is a, c, g, or t
  misc_feature (980)..(980): n is a, c, g, or t
  misc_feature (997)..(997): n is a, c, g, or t
  misc_feature (1002)..(1002): n is a, c, g, or t
  misc_feature (1022)..(1022): n is a, c, g, or t
  misc_feature (1040)..(1040): n is a, c, g, or t
  misc_feature (1042)..(1042): n is a, c, g, or t
  misc_feature (1055)..(1055): n is a, c, g, or t
  misc_feature (1088)..(1088): n is a, c, g, or t
  misc_feature (1097)..(1097): n is a, c, g, or t
  misc_feature (1106)..(1106): n is a, c, g, or t
  misc_feature (1119)..(1119): n is a, c, g, or t
  misc_feature (1123)..(1123): n is a, c, g, or t
  misc_feature (1140)..(1140): n is a, c, g, or t
  misc_feature (1145)..(1145): n is a, c, g, or t
  misc_feature (1148)..(1149): n is a, c, g, or t
  misc_feature (1153)..(1154): n is a, c, g, or t
  misc_feature (1158)..(1160): n is a, c, g, or t
  misc_feature (1166)..(1166): n is a, c, g, or t
  misc_feature (1170)..(1170): n is a, c, g, or t
agagagaattactatgagaggatcgcatcaccatcaccatcacggatcctatttaggtgacactatagaatcgtcgacccacgcgtccgccctgcgcggcatggaggggacggccgtggccgtgttcgagattttgagatttttaataattcactggaagtgtgacatagatgtatcaaagggagcattgctagaagggcagctagtgatttccatagaaggattaaattctaagcaccaggcaaatgctcttcattgtgtaacaactattgcttctgcaggaagcctttttggtggcatggtcctcaagaagttcctaaaagttccagctcccaaactccagacatcttaggaagggttttatgcttctggattttcctttcctcctgaatttcatcactcaggaaatcaatcaaagctttgtctccttcgcacgccacacccacagccggaggtgcagggcccgcgaggccgcagggggcccggccgcagaacacgcgcgcaaactgagcagcctgaagggcgggcgcacagccggggcgccggccaggagctgccggaaaggcggggcgggccccgggggtgtggaagccggcgacgcagaagcccagcatatggggcactcagcgcagcagtggcagcatggcggagaggactgcgaacatgtgcggatgcaaaggacaacccaggcctagagacagtctcaaactcctgggctcaagtgattctcctgcctcagcctcccaaattgctgggattacagacttgagccactgcacccagccttctccatgtctttagggacaaacttctaggatgaaatttaggatgaattaagtcattagcttgacaccatgatgtacaaatccctgaatttcagtttcattgttaaaatgccattgtttcaagatgctcagttggctatggaaagataggtcatctatcccagctactcagggggatcttttngancccaanangtcaaggctacagtganctgcnatcacagcactgcactctancccgggcaacaaagtganantgtctccaaaaanaaaataaaaatttatatgggaaaaaaaaccccnaaaaacccncccctattnaaaaaaaaagtcngggnatgggcctacctgactncaaanttnnaaannctannnaatttncccnagggaatta

SEQ ID NO: 427 - DNA, 1157 bp, Homo Sapiens
  misc_feature (815)..(815): n is a, c, g, or t
  misc_feature (858)..(858): n is a, c, g, or t
  misc_feature (871)..(871): n is a, c, g, or t
  misc_feature (903)..(903): n is a, c, g, or t
  misc_feature (921)..(921): n is a, c, g, or t
  misc_feature (924)..(924): n is a, c, g, or t
  misc_feature (933)..(933): n is a, c, g, or t
  misc_feature (951)..(951): n is a, c, g, or t
  misc_feature (954)..(954): n is a, c, g, or t
  misc_feature (968)..(968): n is a, c, g, or t
  misc_feature (971)..(971): n is a, c, g, or t
  misc_feature (976)..(976): n is a, c, g, or t
  misc_feature (978)..(978): n is a, c, g, or t
  misc_feature (998)..(998): n is a, c, g, or t
  misc_feature (1004)..(1004): n is a, c, g, or t
  misc_feature (1010)..(1010): n is a, c, g, or t
  misc_feature (1013)..(1013): n is a, c, g, or t
  misc_feature (1026)..(1026): n is a, c, g, or t
  misc_feature (1032)..(1032): n is a, c, g, or t
  misc_feature (1040)..(1040): n is a, c, g, or t
  misc_feature (1043)..(1043): n is a, c, g, or t
  misc_feature (1051)..(1051): n is a, c, g, or t
  misc_feature (1058)..(1058): n is a, c, g, or t
  misc_feature (1061)..(1061): n is a, c, g, or t
  misc_feature (1064)..(1064): n is a, c, g, or t
  misc_feature (1077)..(1077): n is a, c, g, or t
  misc_feature (1092)..(1092): n is a, c, g, or t
  misc_feature (1097)..(1099): n is a, c, g, or t
  misc_feature (1104)..(1104): n is a, c, g, or t
  misc_feature (1110)..(1110): n is a, c, g, or t
  misc_feature (1115)..(1115): n is a, c, g, or t
  misc_feature (1122)..(1123): n is a, c, g, or t
  misc_feature (1134)..(1134): n is a, c, g, or t
  misc_feature (1136)..(1136): n is a, c, g, or t
  misc_feature (1143)..(1143): n is a, c, g, or t
  misc_feature (1151)..(1152): n is a, c, g, or t
  misc_feature (1155)..(1157): n is a, c, g, or t
gagaaattactatgagaggatcgcatcaccatcaccatcacggatcctatttaggtgacactatagaatcgtcgacccacgcgtccgcggacgcgtgggtgccagtgggcacgcaggccaccatgaagggcatcacgaccgaacagctggacgctctgggttgccgcatctgcctgggcaatacctaccatctgggtctaaggccggtgggtgggctctgcccgcgcggggaggcggcgaggcggcgaggcgtggggagccatggagcgtcctccaggcccggacactcctcccaaagtcaatcgaccagctgtattgagcgcccccaatgaccaggccttgtactgggcgtgaaagagcagcagggactaaagctggccagatctgtctcccaagaagggcccccagggacgcggtcacccctaacctgacactttcttccatcaacccagggacccgagctgatccagaaagccaacggtctccacggcttcatgaattggcctcataatctgctaacggacagcggcggtttccagatggtgtcgctggtgtctctgtccgaggtgacggaggagggcgtccgcttccgctccccctacgacggcaatgagaccctgctgagcccggagaaatccgtgcagatccagaatgcgctgggctcggacatcatcatgcagctggacgacgtggttagcagtactgtgactgggccacgtgtggaggaggccatgtacaggtcaatccgctggctggaccggtgcattgcagcccatcagcggccggacaagcaaaacctcttcgccattatccanggtgggctggacgcaaatctccgggccacctgccttgaaaaanatgaccaagcganacgtgcctggcttccccatcgggggcctgacnggggtgaaaaacaagtcncanttctggcgnatggtggcgctgaacacntcncggctgccaagaanaanccccnanatctgatggggttgggtatnttttgnaaaagnaancaaaaaccctacntgtggnaaatgganttntgggggancccctanccntgnttggggaggtggnttttgggggaaaaangaaannnggttnttaatntgaanaaaaaannaaaaaatgggntntcccttngggggccnnttnnn

SEQ ID NO: 428 - DNA, 1043 bp, Homo Sapiens
  misc_feature (795)..(795): n is a, c, g, or t
  misc_feature (823)..(823): n is a, c, g, or t
  misc_feature (828)..(828): n is a, c, g, or t
  misc_feature (855)..(855): n is a, c, g, or t
  misc_feature (886)..(886): n is a, c, g, or t
  misc_feature (897)..(897): n is a, c, g, or t
  misc_feature (900)..(900): n is a, c, g, or t
  misc_feature (906)..(906): n is a, c, g, or t
  misc_feature (912)..(912): n is a, c, g, or t
  misc_feature (918)..(918): n is a, c, g, or t
  misc_feature (920)..(920): n is a, c, g, or t
  misc_feature (923)..(923): n is a, c, g, or t
  misc_feature (928)..(928): n is a, c, g, or t
  misc_feature (938)..(938): n is a, c, g, or t
  misc_feature (953)..(953): n is a, c, g, or t
  misc_feature (957)..(958): n is a, c, g, or t
  misc_feature (961)..(961): n is a, c, g, or t
  misc_feature (965)..(965): n is a, c, g, or t
  misc_feature (970)..(971): n is a, c, g, or t
  misc_feature (989)..(989): n is a, c, g, or t
  misc_feature (999)..(999): n is a, c, g, or t
  misc_feature (1013)..(1013): n is a, c, g, or t
  misc_feature (1021)..(1021): n is a, c, g, or t
  misc_feature (1030)..(1030): n is a, c, g, or t
  misc_feature (1034)..(1035): n is a, c, g, or t
  misc_feature (1040)..(1040): n is a, c, g, or t
tagagaaattactatgagaggatcgcatcaccatcaccatcacggaatcctatttaggtgacactatagaatcgtcgacccacgcgtccggctccctgcccgaggtcatgactgtcgccacatacagtgctttgacctggagtcgtacctgcagctcaactgtgagcgggggacttggaggtgtcctgtgtgcaacaagacagctttgctggagggcctggaggtggaccagtacatgctgggcatcctgatttacattcagaactctgactatgaggagatcaccatcgaccccacgtgcagctggaagccagtgcccgtgaagcctgacatgcacatcaaggaggagccggatgggccagcactgaagcgctgccgcaccgtgagccccgcccacgtgctcatgcccagcgtgatggagatgatcgccgccctgggccccggcgctgccccctttgcccccctgcagcccccctcagtccctgcccccagcgactaccctggccagggttccagcttcctggggcctggaactttccctgagtccttcccacccaccacgcccagcaccccaacccttgctgagttcaccccgggaccaccccccatctcctaccagtctgacattcccagcagcctcctgacttcagagaagtctaccgcctgcctcccaagccagatggcaccagcaggtcacctggaccccactcacaatcctgggacaccaggactacacacctccaaccttggggcccctccaggtccccagctgcaccattcaaaccctccccccancgtcccggcagtccttgggccaagcgancttangaacctacgggtgaactggcctttcantcctgccacaagcgtgatggggcccccccancatgtctgganccngggaangccccnaaaacnanctntgganctgctcccgnaactgaaccaaaccntgannaanctantgtcnnaattgggccccacccaancttccctaanaaaaaaaaatgaanaaccttgnttttttcgntttnnaaaanaaa

SEQ ID NO: 429 - DNA, 1149 bp, Homo Sapiens
  misc_feature (1)..(1): n is a, c, g, or t
  misc_feature (830)..(830): n is a, c, g, or t
  misc_feature (921)..(921): n is a, c, g, or t
  misc_feature (932)..(932): n is a, c, g, or t
  misc_feature (957)..(957): n is a, c, g, or t
  misc_feature (969)..(969): n is a, c, g, or t
  misc_feature (1010)..(1010): n is a, c, g, or t
  misc_feature (1016)..(1016): n is a, c, g, or t
  misc_feature (1018)..(1018): n is a, c, g, or t
  misc_feature (1028)..(1028): n is a, c, g, or t
  misc_feature (1030)..(1030): n is a, c, g, or t
  misc_feature (1037)..(1037): n is a, c, g, or t
  misc_feature (1055)..(1055): n is a, c, g, or t
  misc_feature (1058)..(1058): n is a, c, g, or t
  misc_feature (1062)..(1062): n is a, c, g, or t
  misc_feature (1065)..(1065): n is a, c, g, or t
  misc_feature (1067)..(1067): n is a, c, g, or t
  misc_feature (1070)..(1070): n is a, c, g, or t
  misc_feature (1081)..(1081): n is a, c, g, or t
  misc_feature (1098)..(1098): n is a, c, g, or t
  misc_feature (1100)..(1100): n is a, c, g, or t
  misc_feature (1106)..(1106): n is a, c, g, or t
  misc_feature (1109)..(1109): n is a, c, g, or t
  misc_feature (1114)..(1115): n is a, c, g, or t
  misc_feature (1117)..(1117): n is a, c, g, or t
  misc_feature (1122)..(1123): n is a, c, g, or t
  misc_feature (1129)..(1130): n is a, c, g, or t
  misc_feature (1141)..(1141): n is a, c, g, or t
naaatagagaaattactatgagaggatcgcatcaccatcaccatcacggatcctatttaggtgacactatagaatcgtcgacccacgcgtccggagttgtggaaccaaagagagctgtctccagagaagattctcaaagaccaggtgcccacttaactgtgaaaaagatatttgttggtggcattaaagaagacactgaagaacatcacctaagagattattttgaacagtatggaaaaattgaagtgattgaaatcatgactgaccgaggcagtggcaagaaaaggggctttgcctttgtaacctttgacgaccatgactccgtggataagattgtcattcagaaataccatactgtgaatggccacaactgtgaagttagaaaagccctgtcaaagcaagagatggctagtgcttcatccagccaaagaggtcgaagtggttctggaaactttggtggtggtcgtggaggtggtttcggtgggaatgacaacttcggtcgtggaggaaacttcagtggtcgtggtggctttggtggcagccgtggtggtggtggatatggtggcagtggggatggctataatggatttggtaatgatggaagcaattttggaggtggtggaagctacaatgattttgggaattacaacaatcagtcttcaaattttggacccatgaagggaggaaattttggaggcagaagctctggcccctatggcggtggaggccaatactttgcaaaaccacgaaaccaaggtggctatggcggttccagcagcagcagtagctatggcagtggcagaagattttaattaggaaacaaagcttancaggagaggagagccagagaagtgacagggaagctacagggttacaacagattttgtgaactcagccaagcacagtggtggcagggcctanctgctacaaanaagacatgttttaaacaaatactcntgtgtatgggcnaaaaactccaggactgtatttgggactaattgtatacaggntatttnantttctgttcngnggaaagngtaaagcatcccaccaanggntttnaangnaanttttttttttnccccccctgccgttgantngctaantgnaacanncngatcnngacccnnaaaaaatgtcntttttttt

SEQ ID NO: 430 - DNA, 1070 bp, Homo Sapiens
  misc_feature (887)..(887): n is a, c, g, or t
  misc_feature (902)..(902): n is a, c, g, or t
  misc_feature (910)..(910): n is a, c, g, or t
  misc_feature (912)..(912): n is a, c, g, or t
  misc_feature (948)..(948): n is a, c, g, or t
  misc_feature (963)..(963): n is a, c, g, or t
  misc_feature (975)..(975): n is a, c, g, or t
  misc_feature (977)..(977): n is a, c, g, or t
  misc_feature (983)..(983): n is a, c, g, or t
  misc_feature (996)..(996): n is a, c, g, or t
  misc_feature (999)..(999): n is a, c, g, or t
  misc_feature (1003)..(1003): n is a, c, g, or t
  misc_feature (1011)..(1011): n is a, c, g, or t
  misc_feature (1015)..(1015): n is a, c, g, or t
  misc_feature (1018)..(1018): n is a, c, g, or t
  misc_feature (1021)..(1021): n is a, c, g, or t
  misc_feature (1025)..(1025): n is a, c, g, or t
  misc_feature (1027)..(1027): n is a, c, g, or t
  misc_feature (1038)..(1038): n is a, c, g, or t
  misc_feature (1044)..(1044): n is a, c, g, or t
  misc_feature (1050)..(1051): n is a, c, g, or t
  misc_feature (1054)..(1054): n is a, c, g, or t
  misc_feature (1057)..(1057): n is a, c, g, or t
  misc_feature (1060)..(1060): n is a, c, g, or t
aatagagaaattactatgagaggatcgcatcaccatcaccatcacggatcctatttaggtgacactatagaatcgtcgacccacgcgtccgtgaccttggagatacctcatcatatcacacaaagagatgcagatagaactttgagcatacctgatgaacagttacactcatttgcggtttccaccgtgcacattatgaagaaaagaaatggaggtgggagtttaaataactattcctcctccattccatcgactcccagcaccagccaggaggaccctcagttcagtgttcctcccactgccaacacacccacgcccgtttgcaagcggtccatgcgctggtccaacctgtttacatctgagaaagggagtgacccagacaaagagaggaaagccccggagaatcatgctgacaccatcgggagcggtagagccatccccattaaacagggcatgctcttaaagcgaagtgggaaatggctgaagacatggaaaaagaaatacgtcaccctgtgttccaatggcatgctcacctattattcaagcttaggtgattatatgaagaatattcataaaaaagagattgaccttcagacatctaccatcaaagtcccaggaaagtggccatccctagccacatcggcctgcacacccatctccagctctaaaagcaatggcctatccaaggacatggacaccgggctgggtgactccatatgcttcagccccagtatctccagcaccaccagccccaagctcaacccgcccccctctcctcatgctaataaaaagaaacacctaaagaagaaaagcaccaacaactttatgattgtgtctgccactggccaaacgtggcactttgaagccacgacgtatgaggagcgggnatgcctgggtccaanccatccananccagatcctggccagcctgcagtcatgcgaaagcantaaaacaagtcccanctgaccagccanancgaagncatggccctgcantcnatcnaaaatgcntggnacnccnctgngngactgggaaanccaaancctaannggncanttngaacttggga

SEQ ID NO: 431 - DNA, 1086 bp, Homo Sapiens
  misc_feature (741)..(741): n is a, c, g, or t
  misc_feature (878)..(878): n is a, c, g, or t
  misc_feature (893)..(893): n is a, c, g, or t
  misc_feature (896)..(896): n is a, c, g, or t
  misc_feature (925)..(925): n is a, c, g, or t
  misc_feature (935)..(935): n is a, c, g, or t
  misc_feature (941)..(941): n is a, c, g, or t
  misc_feature (958)..(958): n is a, c, g, or t
  misc_feature (965)..(965): n is a, c, g, or t
  misc_feature (986)..(986): n is a, c, g, or t
  misc_feature (990)..(990): n is a, c, g, or t
  misc_feature (993)..(993): n is a, c, g, or t
  misc_feature (995)..(995): n is a, c, g, or t
  misc_feature (1002)..(1002): n is a, c, g, or t
  misc_feature (1007)..(1007): n is a, c, g, or t
  misc_feature (1019)..(1020): n is a, c, g, or t
  misc_feature (1024)..(1024): n is a, c, g, or t
  misc_feature (1027)..(1027): n is a, c, g, or t
  misc_feature (1030)..(1030): n is a, c, g, or t
  misc_feature (1032)..(1032): n is a, c, g, or t
  misc_feature (1038)..(1038): n is a, c, g, or t
  misc_feature (1047)..(1047): n is a, c, g, or t
  misc_feature (1049)..(1049): n is a, c, g, or t
  misc_feature (1053)..(1053): n is a, c, g, or t
  misc_feature (1055)..(1055): n is a, c, g, or t
  misc_feature (1072)..(1073): n is a, c, g, or t
agagagaattactatgagaggatcgcatcaccatcaccatcacggatcctatttaggtgacactatagaatcgtcgacccacgcgtccgatgtgaagacctattcaacgagctttaccccgatgtatcacgcagttaccaaaaggaaaacaaaatgtgtgatgaaaatggtctgtgctaacaaggaagaaaaggtggttgggatccatatgcagggacttgggtgtgatgaaatgctgcagggttttgctgttgcagtgaagatgggagcaacgaaggcagactttgacaacacagtcgccattcaccctacctcttcagaagagctggtcacacttcgttgagaaccaggagacacgtgtggcgggcagtgggacccatagatcttctgaaatgaaacaaataatcacattgacttactgtttgagttttatgtatttctttattttaatcaggatcttctgatagtggaaatttttagtacataatagaacttatttatggagttagaaatttgtagtgttatccaggattgattttcatttgatcacatctcacagtaattaatattttcaagttttttttttattaacagctctgtgctagttttttttttctgttttagcctcatcccaaatataaagctttgtgaagtacaattaacttaatgtacttgaatgaatagaacttgctactttttttttttttttttttgagacagagttttgctctcattgcccangctggagtgcggtggtgctatttcagctcaccacaacctctgcctcctgggttcaggcgattctcctgccttagcctcccgaatagctggaattacaggcacgcaccaccatgcctgactaattttgtatttttagnaaacatggggtttcnccntgttggtcaggctggtctcaaaccccccnccttcagggngatccncccccccccggcccccntgagggngctgaaattacagggggggancccntgngnccacctngctanttttcccaaaanntganggncantncttccnatgtaaacngngccngngcccaaaaacctttatnnttttttttaaaac

SEQ ID NO: 432 - DNA, 1074 bp, Homo Sapiens
  misc_feature (12)..(12): n is a, c, g, or t
  misc_feature (869)..(869): n is a, c, g, or t
  misc_feature (887)..(887): n is a, c, g, or t
  misc_feature (923)..(923): n is a, c, g, or t
  misc_feature (926)..(926): n is a, c, g, or t
  misc_feature (929)..(929): n is a, c, g, or t
  misc_feature (960)..(960): n is a, c, g, or t
  misc_feature (965)..(966): n is a, c, g, or t
  misc_feature (969)..(969): n is a, c, g, or t
  misc_feature (978)..(978): n is a, c, g, or t
  misc_feature (982)..(982): n is a, c, g, or t
  misc_feature (1011)..(1011): n is a, c, g, or t
  misc_feature (1016)..(1016): n is a, c, g, or t
  misc_feature (1022)..(1022): n is a, c, g, or t
  misc_feature (1026)..(1026): n is a, c, g, or t
  misc_feature (1043)..(1043): n is a, c, g, or t
  misc_feature (1045)..(1045): n is a, c, g, or t
  misc_feature (1048)..(1048): n is a, c, g, or t
  misc_feature (1051)..(1051): n is a, c, g, or t
  misc_feature (1054)..(1054): n is a, c, g, or t
  misc_feature (1057)..(1057): n is a, c, g, or t
  misc_feature (1069)..(1070): n is a, c, g, or t
  misc_feature (1072)..(1072): n is a, c, g, or t
  misc_feature (1074)..(1074): n is a, c, g, or t
agagaaattacnatgagaggatcgcatcaccatcaccatcacggatcctatttaggtgacactatagaatcgtcgacccacgcgtccgctcgtcgtgaagacacagcgcatctccccgctgtaggcttcctcccacagaacccgtttcgggcctcagagcgtctggtgagatgctgttgccgctgctgctgctgctacccatgtgctgggccgtggaggtcaagaggccccggggcgtctccctcaccaatcatcacttctacgatgagtccaagcctttcacctgtctggacggttcggccaccatcccatttgatcaggtcaacgatgactattgcgactgcaaagatggctctgacgagccaggcacggctgcctgtcctaatggcagcttccactgcaccaacactggctataagcccctgtatatcccctccaaccgggtcaacgatggtgtttgtgactgctgcgatggaacagacgagtacaacagcggcgtcatctgtgagaacacctgcaaagagaagggccgtaaggagagagagtccctgcagcagatggccgaggtcacccgcgaagggttccgtctgaagaagatccttattgaggactggaagaaggcacgggaggagaagcagaaaaagctcattgagctacaggctgggaagaagtctctggaagaccaggtggagatgctgcggacagtgaaggaggaagctgagaagccagagagagaggccaaagagcagcaccagaagctgtgggaagagcagctggctgctgccaaggcccaacaggagcaggagctggcggctgatgccttcaaggagctggatgatgacatggacgggacggtctcggtgactganctgcaaactcacccgganctggacacagatgggggatgggggcgttgtcaaaancgnaanctcaggccctcctcagtggggaaacacaaanagaannccncttcttttntacnaccgcgtctgggccgccatcagggaaaantaacnggtccnaggnactgcccaccgaacttncngcnacnttntgnccctgaattganngnan

SEQ ID NO: 433 - DNA, 864 bp, Homo Sapiens
  misc_feature (837)..(838): n is a, c, g, or t
  misc_feature (843)..(864): n is a, c, g, or t
tagagaaattactatgagaggatcgcatcaccatcaccatcacggatcctatttaggtgacactatagaatcgtcgacccacgcgtccgagcgcgtccaggtgggaggttagtgtggcccgggcgtccgctcctcagcggatgtggcagccccgagccatggctctcgccgtccgagtcgtttattgtggcgcttgaggctacaagtccaagtatcttcagctcaagaagaagttagaagatgagttccccggccgcctggacatctgcggcgagggaactccccaggccaccgggttctttgaagtgatggtagccgggaagttgattcactctaagaagaaaggcgatggctacgtggacacagaaagcaagtttctgaagttggtggccgccatcaaagccgccttggctcagggctaatgcgccctgaaggcagagtccagggaccttgacccagcccctctcagcagacgcttcatgataggaaggactgaaaagtcttgtggacacctggtctttccctgatgttctcgtggctgctgttgggggcagagattgacgcccccggtctttgcctctgagcgggagagtctgtgtgtatgtgtcttccccggaatccacaccaccccaccctcctcctgtcccgtggtttcatcatatctctttgcataccccatgtcttccccagttgtcccctggagtttggggggacatcccgcctcaggcatccttctcaaggggaagccaagagaggcatcaggatgggtgggtttctgattgtggcaacgtttgcaaccgttcacgattcaataaatattggatgaatttaaccgannaaaannnnnnnnnnnnnnnnnnnnnn

SEQ ID NO: 434 - DNA, 663 bp, Homo Sapiens
  misc_feature (2)..(2): n is a, c, g, or t
  misc_feature (4)..(4): n is a, c, g, or t
  misc_feature (606)..(606): n is a, c, g, or t
  misc_feature (612)..(612): n is a, c, g, or t
  misc_feature (617)..(617): n is a, c, g, or t
  misc_feature (633)..(633): n is a, c, g, or t
  misc_feature (637)..(638): n is a, c, g, or t
  misc_feature (642)..(642): n is a, c, g, or t
  misc_feature (644)..(645): n is a, c, g, or t
  misc_feature (648)..(648): n is a, c, g, or t
  misc_feature (650)..(650): n is a, c, g, or t
  misc_feature (655)..(655): n is a, c, g, or t
  misc_feature (660)..(661): n is a, c, g, or t
antntagaaattactatgagaggatcgcatcaccatcaccatcacggatcctatttaggtgacactatagaatcgtcgacccacgcgtccggcccccgccgccctccaaggacggggacgcggtgcagacgccgcagctctacaccaccttcctgccgcctccggagggcgtgcccccgccggagctggcctgcctgcccacccccgagtccacgccggagctgccggtcaagcacctccgcgccgccggggacccctgggagtggaaccagaacaggaacaacgccaaggagggtccgggccgctcacggggcgggcacgcggcgggcgggcccgcgccccgcgtgctggtgaggccaccgccgcccggctgtcccgggcaggccgtggaagtcaccaccctggaggaactgctgcgctacctgcacggcccgcagccgcccagaaagggggccgagccccccgcccctttaacctcgcgggcgctcccgccggagcccgcccccgccctcttgggcggccccagccccaggccccacgagtgcgcctcgccgctgaggctggacgtgccccccgagggcaggtgcgcctctgcccccgcccggnccgcgntctcngcccccgctccccggntggnngtcngnngangncggangttgnntt

SEQ ID NO: 435 - DNA, 992 bp, Homo Sapiens
  misc_feature (4)..(4): n is a, c, g, or t
  misc_feature (835)..(835): n is a, c, g, or t
  misc_feature (901)..(901): n is a, c, g, or t
  misc_feature (919)..(919): n is a, c, g, or t
  misc_feature (932)..(932): n is a, c, g, or t
  misc_feature (971)..(971): n is a, c, g, or t
  misc_feature (983)..(983): n is a, c, g, or t
aatnagagaaattactatgagaggatcgcatcaccatcaccatcacggatcctatttaggtgacactatagaatcgtcgacccacgcgtccgcggacgcgtggggggagccgtccggcgcagcagtttctaggtccccactgtccccgccgtcccgccccttcgcgtcccgggaaccggctggcttccgagccgcactcgccgatcctccaggcatgccccgctacgagctggctttaatcctgaaagccatgcagcggccagagactgctgctactttgaaacgtacgatagaggccctgatggacagaggagcaatagtgagggacttggaaaacctgggtgaacgagcgcttccttataggatctctgcccacagtcagcagcacaacagaggcgggtatttcttggtggatttttatgcacccaccgcagctgttgaaagcatggtggagcacttgtctcgagatatagatgtgattagagggaatattgtcaaacaccctctgacccaggaactaaaagaatgtgaagggattgtcccagtcccactcgcagaaaaattatattccacaaagaagaggaagaagtgagaagattcgccagattttagccttatatgtaattccttcacatttgggcagcatggacgagaaggaagaatttgcaagtttggcctttatataagcatgtgttgcaggtgctgtttgatttttctaaggtatttttagcccttgatcccctttgcttgcgagaggtggggaaactgctcactgacagcttctctgtaacctgcagtaccagtggatcgtttcttgattttgttttcattaagngtcattttctttgtcattgaggaacttttcccccttacaacaagtaaccaccatttttttgaaaancaaaacttataataaccnccctggggattgngagctaattcattcagcctgtgtaaccattgtgggaaanaaaaattgaccnaccaatgtt

SEQ ID NO: 436 - DNA, 1060 bp, Homo Sapiens
  misc_feature (2)..(2): n is a, c, g, or t
  misc_feature (6)..(12): n is a, c, g, or t
  misc_feature (16)..(16): n is a, c, g, or t
  misc_feature (25)..(25): n is a, c, g, or t
  misc_feature (774)..(774): n is a, c, g, or t
  misc_feature (816)..(816): n is a, c, g, or t
  misc_feature (822)..(822): n is a, c, g, or t
  misc_feature (844)..(844): n is a, c, g, or t
  misc_feature (858)..(858): n is a, c, g, or t
  misc_feature (876)..(876): n is a, c, g, or t
  misc_feature (900)..(900): n is a, c, g, or t
  misc_feature (904)..(905): n is a, c, g, or t
  misc_feature (926)..(927): n is a, c, g, or t
  misc_feature (937)..(937): n is a, c, g, or t
  misc_feature (944)..(944): n is a, c, g, or t
  misc_feature (960)..(960): n is a, c, g, or t
  misc_feature (962)..(963): n is a, c, g, or t
  misc_feature (969)..(969): n is a, c, g, or t
  misc_feature (972)..(972): n is a, c, g, or t
  misc_feature (974)..(974): n is a, c, g, or t
  misc_feature (976)..(976): n is a, c, g, or t
  misc_feature (986)..(987): n is a, c, g, or t
  misc_feature (993)..(993): n is a, c, g, or t
  misc_feature (1005)..(1005): n is a, c, g, or t
  misc_feature (1010)..(1010): n is a, c, g, or t
  misc_feature (1017)..(1017): n is a, c, g, or t
  misc_feature (1023)..(1023): n is a, c, g, or t
  misc_feature (1035)..(1035): n is a, c, g, or t
  misc_feature (1041)..(1041): n is a, c, g, or t
  misc_feature (1058)..(1058): n is a, c, g, or t
cntttnnnnnnnaatngagagaatnactatgagaggatcgcatcaccatcaccatcacggatcctatttaggtgacactatagaatcgtcgacccacgcgtccgcccacgcgtccgcagcggctgacgggccggatcgccttcgccgccgcccgcccgcaaaccttcgtgcccggcccgtcctcgcccccgcctccgccaccgcctcggcccgcagagcttgccccctccccacccgcagacatgtccgagtccaagagcggccccgagtatgcttcgtttttcgccgtcatgggcgcctcggccgccatggtcttcagcgccctgggcgctgcctatggcacagccaagagcggtaccggcattgcggccatgtctgtcatgcggccggagcagatcatgaagtccatcatcccagtggtcatggctggcatcatcgccatctacggcctggtggtggcagtcctcatcgccaactccctgaatgacgacatcagcctctacaagagcttcctccagctgggcgccggcctgagcgtgggcctgagcggcctggcagccggctttgccatcggcatcgtgggggacgctggcgtgcggggcaccgcccagcagccccgactattcgtgggcatgatcctgattctcatcttcgccgaggtgctcggcctctacggtctcatcgtcgccctcatcctctccacaaagtagaccctctccgagcccaccagccacagaatattatgtaaagaccacccctcctcattccagaacnaacagcctgacacatacgcacgggggccgccgcccccagtanttggtnttgtacatgcgcagtgtcctantgcccatcgtctgnttccccggccttgccccngcccgccccgtgccggggacattntggnnccaaataatcgccccttcaannccccgggggnccccaancccctaaaatgttttntnnatgcgnaanantnaaaattgtanntttctnttttacagggangtttnatttaanaaaaanttgggcttgttnctttcntttggggaaagggcccntt

SEQ ID NO: 437 - DNA, 1179 bp, Homo Sapiens
  misc_feature (2)..(2): n is a, c, g, or t
  misc_feature (844)..(844): n is a, c, g, or t
  misc_feature (934)..(934): n is a, c, g, or t
  misc_feature (940)..(940): n is a, c, g, or t
  misc_feature (981)..(981): n is a, c, g, or t
  misc_feature (989)..(989): n is a, c, g, or t
  misc_feature (995)..(995): n is a, c, g, or t
  misc_feature (1008)..(1008): n is a, c, g, or t
  misc_feature (1028)..(1028): n is a, c, g, or t
  misc_feature (1043)..(1043): n is a, c, g, or t
  misc_feature (1062)..(1062): n is a, c, g, or t
  misc_feature (1077)..(1077): n is a, c, g, or t
  misc_feature (1102)..(1102): n is a, c, g, or t
  misc_feature (1104)..(1104): n is a, c, g, or t
  misc_feature (1108)..(1108): n is a, c, g, or t
  misc_feature (1110)..(1110): n is a, c, g, or t
  misc_feature (1117)..(1117): n is a, c, g, or t
  misc_feature (1134)..(1134): n is a, c, g, or t
  misc_feature (1145)..(1145): n is a, c, g, or t
  misc_feature (1153)..(1153): n is a, c, g, or t
  misc_feature (1156)..(1156): n is a, c, g, or t
  misc_feature (1161)..(1161): n is a, c, g, or t
  misc_feature (1166)..(1166): n is a, c, g, or t
  misc_feature (1175)..(1175): n is a, c, g, or t
  misc_feature (1177)..(1177): n is a, c, g, or t
antagaggaaaattactatgaagaggatcgcatcaccatcaccatcacggatcctatttaggtgacactatagaatcgtcgacccacgcgtccgcccacgcgtccgcccacgcgtccgcttccccagagacacctgattcttctgcttcaaaagtcctcaaaagagagggaactgatacaactgcaaagactagcaaactgcggggactgaagcctaagaagaccacaactcggcgacccaagcccacgcgcccagccagtactggggtggctggggccagtagctccctgggcccctctggctcagcgtcagcaggtgagctgagcagcagtgagcccagcaccccggctcagactccgctggcagcacccatcatccccacgccggtcctcacctctcctggagcagtccccccgcttccttccccatccaaggaggaggagggactaagggctcaggtgcgggacctggaggagaaactagagaccctgagactgaaacgggcagaagacaaagcaaagctaaaagagctggagaaacacaaaatccagctggagcaggtgcaggaatggaagagcaaaatgcaggagcagcaggccgacctgcagcggcgcctcaaggaggcgagaaaggaagccaaggaggcgctggaggcaaaggaacgctatatggaggagatggctgatactgctgatgccattgagatggccactttggacaaggagatggctgaagagcgggctgagtccctgcagcaggaggtggaggcactgaaggagcgggtggacgagctcactactgacttagagatcctcaaggctgagattgaagagaagggctcanatggcgctgcatccagttatcagctcaagcagcttgaggagcagaatgcccgcctgaaggatgccctggtgaggatgcgggatctttctncctcanagaagcaggagcatgtgagctccaaagctcatggaaaaaanaaccaaanctgganttgtgaggcacancgggagcgtctgcaggaganctaaccaggcaaaancaccttgatgactcaggancagtggatgctgctntggtgctaagaaatggtgaaatttnanaatngnacctganttggaaaaaaatgcccnatttagggaantggggaanttnaaccntaatnaataaaaanantt

SEQ ID NO: 438 - DNA, 788 bp, Homo Sapiens
  misc_feature (1)..(1): n is a, c, g, or t
  misc_feature (527)..(527): n is a, c, g, or t
  misc_feature (630)..(631): n is a, c, g, or t
  misc_feature (661)..(661): n is a, c, g, or t
  misc_feature (699)..(699): n is a, c, g, or t
  misc_feature (708)..(708): n is a, c, g, or t
  misc_feature (714)..(714): n is a, c, g, or t
  misc_feature (734)..(734): n is a, c, g, or t
  misc_feature (736)..(737): n is a, c, g, or t
  misc_feature (741)..(741): n is a, c, g, or t
  misc_feature (746)..(746): n is a, c, g, or t
  misc_feature (759)..(759): n is a, c, g, or t
  misc_feature (763)..(763): n is a, c, g, or t
  misc_feature (767)..(767): n is a, c, g, or t
  misc_feature (773)..(775): n is a, c, g, or t
  misc_feature (778)..(778): n is a, c, g, or t
  misc_feature (780)..(780): n is a, c, g, or t
  misc_feature (788)..(788): n is a, c, g, or t
naatagagaaattactatgagaggatcgcatcaccatcaccatcacgggatcctatttaggtgacactatagaatcgtcgacccacgcgtccgcggacgcgtgggaccttacccggatcccctacccagctggaactctccctaaccccctgcttcctcaccctctgcacgagaacgaagttcttcgtcaccagctctttgctgccccttaccgggacctgccggcctccctttctgccccgatgtcagcagctcatcagctgcaggccatgcacgcacagtcagctgagctgcagcgcttggcgctggaacagcagcagtggctgcatgcccatcacccgctgcacagtgtgccgctgcctgcccaggaggactactacagtcacctgaagaaggaaagcgacaagccactgtagaacctgcgatcaagagagcaccatggctcctacattggaccttggagcacccccaccctccccccaccgtgcccttggcctgccacccagagccaagagggtgctgctcanttgcagggcctccgcagctggacagagagtgggggagggagggacagacagaaggccaaggcccgatgtggtgtgcagaggtggggaggtggcgaggatgggnnacagaaagcgcaacagaattcttggaccangtctctcttccttgtcccccctgcttttctcctccccnatgcccaanccctgnggccgcccgcccctcccccngnnccgnttggngtgaattaatttnatcnggtnaaaatnnngantntttttgcn

SEQ ID NO: 439 - DNA, 928 bp, Homo Sapiens
  misc_feature (3)..(3): n is a, c, g, or t
  misc_feature (919)..(919): n is a, c, g, or t
atngagaaattactatgagaggatcgcatcaccatcaccatcacggatcctatttaggtgacactatagaatcgtcgacccacgcgtccgatccgtggttttttggcaaaatccccagagccaaggcagaagaaatgcttagcaaacagcggcacgatggggcctttcttatccgagagagtgagagcgctcctggggacttctccctctctgtcaagtttggaaacgatgtgcagcacttcaaggtgctccgagatggagccgggaagtacttcctctgggtggtgaagttcaattctttgaatgagctggtggattatcacagatctacatctgtctccagaaaccagcagatattcctgcgggacatagaacaggtgccacagcagccgacatacgtccaggccctctttgactttgatccccaggaggatggagagctgggcttccgccggggagattttatccatgtcatggataactcagaccccaactggtggaaaggagcttgccacgggcagaccggcatgtttccccgcaattatgtcacccccgtgaaccggaacgtctaagagtcaagaagcaattatttaaagaaagtgaaaaatgtaaaacacatacaaaagaattaaacccacaagctgcctctgacagcagcctgtgagggagtgcagaacacctggccgggtcaccctgtgaccctctcactttggttggaactttagggggtgggagggggcgttggatttaaaaatgccaaaacttacctataaattaagaagagtttttattacaaattttcactgctgctcctctttcccctcctttgtcttttttttcatccttttttctcttctgtccatcagtgcatgacgtttaaggccacgtatagtcctagctgacgcccataataaaaaancaagaaacc

SEQ ID NO: 440 - DNA, 878 bp, Homo Sapiens
tgagaggtcgcatcaccatcaccatcacggatcctatttaggtgacactatagaatcgtcgacccacgcgtccgcggacgcgtgggtgagctgctgccgccgccgcctctgtcgtcgtcgcgagtgtggagtcgggactggagctgctgccgcggcgacgccggggatctttgtcgctagctcccggcccttctgccccgccgccttccctcagtcagcgttgcccactcctctccggccgggcgcccctgcctccatttctcgctctctgtccaccacacacacggcccccccgatcatggatccgggcagtggcggcggcggcggcggcggcggcggcggcgggagcagcagcggcagcagcagcagcgactcggcgcctgactgctgggaccaggcggacatggaagcccccgggccgggcccttgcggcggcggcggctccctggcggcggcggccgaggcccagcgggagaacctcagcgcggccttcagccggcaactcaacgtcaacgccaagcccttcgtgcccaacgtccacgccgccgagttcgtgccgtccttcctgcggggcccggcagcgccgccacccccagctggcggcgccgccaataaccacggagccggcagcggcgcgggaggccgtgcggcacctgtggaatcctctcaagaggaacagtcattgtgtgaaggttcaaattcagctgttagcatggaactttcagaacctattgtagaaaatggagagacagaaatgtctccagaagaatcatgggagcacaaagaagaaataagtgaagcagagccagggggtggttccttgggagatggaaggccgccagaggaaagtgcccatgaaatgatggaggaggaagagg

SEQ ID NO: 441 - DNA, 1179 bp, Homo Sapiens
  misc_feature (1)..(1): n is a, c, g, or t
  misc_feature (4)..(4): n is a, c, g, or t
  misc_feature (829)..(829): n is a, c, g, or t
  misc_feature (850)..(850): n is a, c, g, or t
  misc_feature (863)..(863): n is a, c, g, or t
  misc_feature (900)..(900): n is a, c, g, or t
  misc_feature (932)..(932): n is a, c, g, or t
  misc_feature (935)..(935): n is a, c, g, or t
  misc_feature (947)..(947): n is a, c, g, or t
  misc_feature (962)..(962): n is a, c, g, or t
  misc_feature (967)..(967): n is a, c, g, or t
  misc_feature (989)..(989): n is a, c, g, or t
  misc_feature (992)..(992): n is a, c, g, or t
  misc_feature (999)..(999): n is a, c, g, or t
  misc_feature (1001)..(1001): n is a, c, g, or t
  misc_feature (1004)..(1004): n is a, c, g, or t
  misc_feature (1011)..(1011): n is a, c, g, or t
  misc_feature (1013)..(1013): n is a, c, g, or t
  misc_feature (1024)..(1024): n is a, c, g, or t
  misc_feature (1029)..(1029): n is a, c, g, or t
  misc_feature (1039)..(1039): n is a, c, g, or t
  misc_feature (1045)..(1045): n is a, c, g, or t
  misc_feature (1049)..(1049): n is a, c, g, or t
  misc_feature (1063)..(1063): n is a, c, g, or t
  misc_feature (1068)..(1068): n is a, c, g, or t
  misc_feature (1074)..(1074): n is a, c, g, or t
  misc_feature (1089)..(1089): n is a, c, g, or t
  misc_feature (1091)..(1091): n is a, c, g, or t
  misc_feature (1100)..(1100): n is a, c, g, or t
  misc_feature (1107)..(1107): n is a, c, g, or t
  misc_feature (1115)..(1116): n is a, c, g, or t
  misc_feature (1123)..(1123): n is a, c, g, or t
  misc_feature (1126)..(1126): n is a, c, g, or t
  misc_feature (1130)..(1130): n is a, c, g, or t
  misc_feature (1138)..(1138): n is a, c, g, or t
  misc_feature (1141)..(1141): n is a, c, g, or t
  misc_feature (1153)..(1154): n is a, c, g, or t
  misc_feature (1167)..(1167): n is a, c, g, or t
  misc_feature (1170)..(1170): n is a, c, g, or t
naanagagagaattactatgagaggatcgcatcaccatcaccatcacggatcctatttaggtgacactatagaatcgtcgacccacgcgtccggtgaattccaggatgcctatgttctgttgagtgaaaagaaaatttctagtatccagtccattgtacctgctcttgaaattgccaatgctcaccgtaagcctttggtcataatcgctgaagatgttgatggagaagctctaagtacactcgtcttgaataggctaaaggttggtcttcaggttgtggcagtcaaggctccagggtttggtgacaatagaaagaaccagcttaaagatatggctattgctactggtggtgcagtgtttggagaagagggattgaccctgaatcttgaagacgttcagcctcatgacttaggaaaagttggagaggtcattgtgaccaaagacgatgccatgctcttaaaaggaaaaggtgacaaggctcaaattgaaaaacgtattcaagaaatcattgagcagttagatgtcacaactagtgaatatgaaaaggaaaaactgaatgaacggcttgcaaaactttcagatggagtggctgtgctgaaggttggtgggacaagtgatgttgaagtgaatgaaaagaaagacagagttacagatgcccttaatgctacaagagctgctgttgaagaaggcattgttttgggagggggttgtgccctccttcgatgcattccagccttggactcattgactccagctaatgaagatcaaaaaattggtatagaaattattaaaagaacactccaaaattccagcaatgaccattgcctaanaatgcaggtgttgaaggatcntttgatagttganaaaattatgcaaagttcctcaaaagttgggttatgangctatggctgggaaattttgtgaaatatgggnggnaaaaaggaatcnttgaccccacaaaangttgnggaaaactgcttttatgggaangcngcctggngnggncctctcngnttactaccgcnaaaanttgtagtccnaaaaantccntaaaaaaaaaaaanacccntgaaangggggccaatgaatngnaatgggaanggggtantgggaagnnggccatnttncaanccccaaanaanggctttcccttnnaaaagaaacgggnaanggaaacccc

SEQ ID NO: 442 - DNA, 811 bp, Homo Sapiens
  misc_feature (784)..(784): n is a, c, g, or t
  misc_feature (788)..(789): n is a, c, g, or t
  misc_feature (791)..(792): n is a, c, g, or t
  misc_feature (795)..(811): n is a, c, g, or t
tagagaaattaactatgagaggatcgcatcaccatcaccatcacggatcctatttaggtgacactatagaatcgtcgacccacgcgtccggggagcccagctgcccaccctctggacattcacccagccaggtggtctcgtcacctcagaggctccgccagactcctgcccaggccaggactgaggcaagcctcaaggcacttctaggacctgcctcttctcaccaagatgaactcactggtttcttggcagctactgcttttcctctgtgccacccactttggggagccattagaaaaggtggcctctgtggggaattctagacccacaggccagcagctagaatccctgggcctcctggcccccggggagcagagcctgccgtgcaccgagaggaagccagctgctactgccaggctgagccgtcgggggacctcgctgtccccgccccccgagagctccgggagcccccagcagccgggcctgtccgccccccacagccgccagatccccgcaccccagggcgcggtgctggtgcagcgggagaaggacctgccgaactacaactggaactccttcggcctgcgcttcggcaagcgggaggcggcaccagggaaccacggcagaagcgctgggcggggctgagggcgcaggtgcggggcagtgaacttcagaccccaaaggagtcagagcatgcggggcgggggcggggggcggggacgtagggctaagggagggggcgctggagcttccaacccgaggcaataaaagaaatgttgcgtanctcnnannaannnnnnnnnnnnnnnnn

SEQ ID NO: 443 - DNA, 1129 bp, Homo Sapiens
  misc_feature (824)..(824): n is a, c, g, or t
  misc_feature (936)..(936): n is a, c, g, or t
  misc_feature (947)..(947): n is a, c, g, or t
  misc_feature (1015)..(1015): n is a, c, g, or t
  misc_feature (1024)..(1024): n is a, c, g, or t
  misc_feature (1026)..(1026): n is a, c, g, or t
  misc_feature (1043)..(1043): n is a, c, g, or t
  misc_feature (1049)..(1049): n is a, c, g, or t
  misc_feature (1055)..(1055): n is a, c, g, or t
  misc_feature (1064)..(1064): n is a, c, g, or t
  misc_feature (1072)..(1072): n is a, c, g, or t
  misc_feature (1074)..(1074): n is a, c, g, or t
  misc_feature (1080)..(1080): n is a, c, g, or t
  misc_feature (1085)..(1085): n is a, c, g, or t
  misc_feature (1094)..(1094): n is a, c, g, or t
  misc_feature (1100)..(1100): n is a, c, g, or t
  misc_feature (1108)..(1112): n is a, c, g, or t
  misc_feature (1122)..(1122): n is a, c, g, or t
  misc_feature (1128)..(1128): n is a, c, g, or t
agaaattactatgagaggatcgcatcaccatcaccatcacggatcctatttaggtgacactatagaatcgtcgacccacgcgtccggcgagacacttcgccgaggcacagcagccggcaggatggcgaccgtggtggtggaagccaccgagccggagccgtccggcagcatcgccaacccggcggcgtccacctcgcctagcctgtcgcaccgcttccttgacagcaagttctacttgctggtggtcgtcggcgagatcgtgaccgaggagcacctgcggcgtgccatcggcaacatcgagctcggaatccgatcatgggacacaaacctgattgaatgcaacttggaccaagaactcaaactttttgtatctcgacactctgcaagattctctcctgaagtcccaggacaaaagatccttcatcaccgaagtgacgttttagaaacagtggtcctgatcaacccttctgatgaagcagtcagcaccgaggtgcgcttaatgatcactgatgctgcccgacacaagctgctcgtgctgaccgggcagtgctttgaaaataccggagagctcattctccagtccggctctttctccttccagaacttcatagagattttcaccgatcaagagatcggggagttactaagcaccacccatcctgccaacaaagccagcttaaccctgttctgtcctgaagaaggggactggaagaactccaatcttgacagacacaatctccaagacttcatcaatattaaactcaattcagcttctatcttgccagaaatggaaggactttctgagtttaccgagtatctctcanaatcagtggaagtcccatctccctttgacatcttggaacctcccacatcgggtggatttctgaagctctccaagccctgctgttatattttttccaggaaggaaggggcganttctgccttgntttgcagtgaatggttttcaatatgctcatcaatggcggatcaaaaaaaaaaatcctgcttttggaancctcatccnanacttaaaaccgagtggnactccntcctgntccacccanattggggnangaaaantttgncctggaaanaaacancatgtttnnnnngaaaaaattncaaaant

SEQ ID NO: 444 - DNA, 1256 bp, Homo Sapiens
  misc_feature (1)..(1): n is a, c, g, or t
  misc_feature (810)..(810): n is a, c, g, or t
  misc_feature (843)..(843): n is a, c, g, or t
  misc_feature (865)..(865): n is a, c, g, or t
  misc_feature (868)..(868): n is a, c, g, or t
  misc_feature (873)..(873): n is a, c, g, or t
  misc_feature (891)..(891): n is a, c, g, or t
  misc_feature (915)..(915): n is a, c, g, or t
  misc_feature (926)..(926): n is a, c, g, or t
  misc_feature (932)..(932): n is a, c, g, or t
  misc_feature (934)..(935): n is a, c, g, or t
  misc_feature (941)..(941): n is a, c, g, or t
  misc_feature (945)..(945): n is a, c, g, or t
  misc_feature (947)..(947): n is a, c, g, or t
  misc_feature (956)..(956): n is a, c, g, or t
  misc_feature (960)..(960): n is a, c, g, or t
  misc_feature (966)..(966): n is a, c, g, or t
  misc_feature (970)..(970): n is a, c, g, or t
  misc_feature (979)..(979): n is a, c, g, or t
  misc_feature (986)..(986): n is a, c, g, or t
  misc_feature (993)..(993): n is a, c, g, or t
  misc_feature (1006)..(1006): n is a, c, g, or t
  misc_feature (1008)..(1008): n is a, c, g, or t
  misc_feature (1015)..(1015): n is a, c, g, or t
  misc_feature (1019)..(1020): n is a, c, g, or t
  misc_feature (1023)..(1023): n is a, c, g, or t
  misc_feature (1049)..(1049): n is a, c, g, or t
  misc_feature (1054)..(1055): n is a, c, g, or t
  misc_feature (1068)..(1068): n is a, c, g, or t
  misc_feature (1084)..(1086): n is a, c, g, or t
  misc_feature (1114)..(1115): n is a, c, g, or t
  misc_feature (1123)..(1124): n is a, c, g, or t
  misc_feature (1138)..(1138): n is a, c, g, or t
  misc_feature (1146)..(1146): n is a, c, g, or t
  misc_feature (1153)..(1153): n is a, c, g, or t
  misc_feature (1155)..(1155): n is a, c, g, or t
  misc_feature (1163)..(1164): n is a, c, g, or t
  misc_feature (1187)..(1188): n is a, c, g, or t
  misc_feature (1196)..(1196): n is a, c, g, or t
  misc_feature (1207)..(1207): n is a, c, g, or t
  misc_feature (1216)..(1216): n is a, c, g, or t
  misc_feature (1229)..(1229): n is a, c, g, or t
  misc_feature (1243)..(1244): n is a, c, g, or t
  misc_feature (1253)..(1253): n is a, c, g, or t
  misc_feature (1256)..(1256): n is a, c, g, or t
naattagagaaattactatgagaggatcgcatcaccatcaccatcacggatcctatttaggtgacactatagaatcgtcgacccacgcgtccggctctggtgaacctccaaaatcaggggatcgcagcggctacagcagccccggctccccaggcactcccggcagccgctcccgcaccccgtcccttccaaccccacccacccgggagcccaagaaggtggcagtggtccgtactccacccaagtcgccgtcttccgccaagagccgcctgcagacagcccccgtgcccatgccagacctgaagaatgtcaagtccaagatcggctccactgagaacctgaagcaccagccgggaggcgggaaggtgcaaatagtctacaaaccagttgacctgagcaaggtgacctccaagtgtggctcattaggcaacatccatcataaaccaggaggtggccaggtggaagtaaaatctgagaagcttgacttcaaggacagagtccagtcgaagattgggtccctggacaatatcacccacgtccctggcggaggaaataaaaagattgaaacccacaagctgaccttccgcgagaacgccaaagccaagacagaccacggggcggagatcgtgtacaagtcgccagtggtgtctggggacacgtctccacggcatctcagcaatgtctcctccaccggcagcatcgacatggtagactcgcccccagctcgccacgctagctgacgaggtgtctgcctccctggccaagcagggtttgtgatcaggcccctgggggcggtcaataattgtgganaggaaaaaatgaaaaagtgtggaaaaaaaaaanaataatggaccggggcccccgnccntttgnccccaggttgctcctcgnaattcggttaaattggttaaaccncttaaacctgntttttntnnctcggntttngnctcgggaanttcnaaatcngtgngtggggaanaaaaaanaaatttntttttttccaaantngaagggngggnntantaataaaaaattttttaaaaaaaaanttttnnaaaaaattggccnattccaaaattttccnnngggaaatccctttttaaatttttttttnntccccccnncggtaaaaaaaggnaaaaaaanaaaagtntntaaaattnntttttgggggaattttaaggggnnggggggtnccaaacccccntggggcctnttggggggggttncaaaaagggggggnnaaaaaaaanatn

SEQ ID NO: 445 - DNA, 887 bp, Homo Sapiens
tgagaggtcgcatcaccatcaccatcacggatcctatttaggtgacactatagaatcgtcgacccacgcgtccgccagtgccctcccttacgtcaacaatgtcccccaccttgggaacatcattggttgtgtgctcagtgccgatgtctttgccaggtactctcgcctccgccagtggaacaccctctatctgtgtgggacagatgagtatggtacagcaacagagaccaaggctctggaggagggactaaccccccaggagatctgcgacaagtaccacatcatccatgctgacatctaccgctggtttaacatttcgtttgatatttttggtcgcaccaccactccacagcagaccaaaatcacccaggacattttccagcagttgctgaaacgaggttttgtgctgcaagatactgtggagcaactgcgatgtgagcactgtgctcgcttcctggctgaccgcttcgtggagggcgtgtgtcccttctgtggctatgaggaggctcggggtgaccagtgtgacaagtgtggcaagctcatcaatgctgtcgagcttaagaagcctcagtgtaaagtctgccgatcatgccctgtggtgcagtcgagccagcacctgtttctggacctgcctaagctggagaagcgactggaggagtggttggggaggacattgcctggcagtgactggacacccaatgcccagtttatcacccgttcttggcttcgggatggcctcaagccacgctgcataacccgagacctcaaatggggaacccctgtacccttagaaggttttgaagacaaggtattctatgtctggtttgatgccactattggctatctgtccatcacagccaactacacagaccagtgggagagatggt

SEQ ID NO: 446 - DNA, 1179 bp, Homo Sapiens
  misc_feature (1)..(1): n is a, c, g, or t
  misc_feature (891)..(891): n is a, c, g, or t
  misc_feature (937)..(937): n is a, c, g, or t
  misc_feature (993)..(993): n is a, c, g, or t
  misc_feature (1000)..(1000): n is a, c, g, or t
  misc_feature (1003)..(1003): n is a, c, g, or t
  misc_feature (1005)..(1005): n is a, c, g, or t
  misc_feature (1007)..(1007): n is a, c, g, or t
  misc_feature (1035)..(1035): n is a, c, g, or t
  misc_feature (1060)..(1060): n is a, c, g, or t
  misc_feature (1062)..(1062): n is a, c, g, or t
  misc_feature (1084)..(1084): n is a, c, g, or t
  misc_feature (1097)..(1097): n is a, c, g, or t
  misc_feature (1099)..(1099): n is a, c, g, or t
  misc_feature (1129)..(1129): n is a, c, g, or t
  misc_feature (1159)..(1159): n is a, c, g, or t
  misc_feature (1163)..(1163): n is a, c, g, or t
  misc_feature (1166)..(1166): n is a, c, g, or t
  misc_feature (1169)..(1169): n is a, c, g, or t
  misc_feature (1174)..(1174): n is a, c, g, or t
naatagagagattactatgagaggatcgcatcaccatcaccatcacggatcctatttaggtgacactatagaatcgtcgacccacgcgtccgcccacgcgtccgcccacgcgtccggctgcggggagggatcatggatacttgtctgccggcttctggttcccacgcaagtaagcctgctgtcaatggaggaggacattgatacccgcaaaatcaacaacagtttcctgcgcgaccacagctatgcgaccgaagctgacattatctctacggtagaattcaaccacacgggagaattactagcgacaggggacaaggggggtcgggttgtaatatttcaacgagagcaggagagtaaaaatcaggttcatcgtaggggtgaatacaatgtttacagcacattccagagccatgaacccgagttcgattacctgaagagtttagaaatagaagaaaaaatcaataaaataagatggctcccccagcagaatgcagcttactttcttctgtctactaatgataaaactgtgaagctgtggaaagtcagcgagcgtgataagaggccagaaggctacaatctgaaagatgaggagggccggctccgggatcctgccaccatcacaaccctgcgggtgcctgtcctgagacccatggacctgatggtggaggccaccccacgaagagtatttgccaacgcacacacatatcacatcaactccatatctgtcaacagcgactatgaaacctacatgtccgctgatgacctgaggattaacctatggaactttgaaataaccaatcaaagttttaatattgtggacattaagccagccaacatggaggagctcacggaggtgatcacagcagccgagttccacccccatcattgcancaccttcgtgtacagcagcagcaaagggacaatccggctgtgtganatgcgggcatctgccctgtgtgacaggcacaccaaatttttttgaaaagccggaanatccaancancnanatcatttttctctgaaattatctcttcnatttcggatgggaagttcacccccngngggaggtatttcatgaccaggnactacttgaccgncnaaagtctgggaatcccaaaagggaaaaccncccccttcgaaacttaccaggttcatgaanaccnccnccnaaagntgggt

SEQ ID NO: 447 - DNA, 1027 bp, Homo Sapiens
  misc_feature (829)..(829): n is a, c, g, or t
  misc_feature (925)..(925): n is a, c, g, or t
  misc_feature (950)..(950): n is a, c, g, or t
  misc_feature (959)..(959): n is a, c, g, or t
  misc_feature (994)..(994): n is a, c, g, or t
  misc_feature (1004)..(1004): n is a, c, g, or t
  misc_feature (1006)..(1027): n is a, c, g, or t
tagagaaattactatgagaggatcgcatcaccatcaccatcacggatcctatttaggtgacactatagaatcgtcgacccacgcgtccgctaagatggaagcgtttttggggtcgcggtccggactttgggcggggggtccggccccaggacagttttaccgcattccatccactcccgattccttcatggatccggcgtctgcactttacagaggtccaatcacgcggacccagaaccccatggtgaccgggacctcagtcctcggcgttaagttcgagggcggagtggtgattgccgcagacatgctgggatcctacggctccttggctcgtttccgcaacatctctcgcattatgcgagtcaacaacagtaccatgctgggtgcctctggcgactacgctgatttccagtatttgaagcaagttctcggccagatggtgattgatgaggagcttctgggagatggacacagctatagtcctagagctattcattcatggctgaccagggccatgtacagccggcgctcgaagatgaaccctttgtggaacaccatggtcatcggaggctatgctgatggagagagcttcctcggttatgtggacatgcttggtgtagcctatgaagccccttcgctggccactggttatggtgcatacttggctcagcctctgctgcgagaagttctggagaagcagccagtgctaagccagaccgaggcccgcgacttagtagaacgctgcatgcgagtgctgtactaccgagatgcccgttcttacaaccggtttcaaatcgccactgtcaccgaaaaaggtgttgaaataganggaccattgtctacagagaccaactgggatattgcccacatgatcagtggctttgaatgaaatacagatgcattatccaaaaactgaagttgcccntacttttaactttgaacttggctanttcaaaganagactcttcttttgtaaagtaaataaattcttccnaaaaaaaaanannnnnnnnnnnnnnnnnnnnnn

SEQ ID NO: 448 - DNA, 1016 bp, Homo Sapiens
  misc_feature (748)..(748): n is a, c, g, or t
  misc_feature (859)..(859): n is a, c, g, or t
  misc_feature (861)..(861): n is a, c, g, or t
  misc_feature (919)..(919): n is a, c, g, or t
  misc_feature (927)..(927): n is a, c, g, or t
  misc_feature (944)..(944): n is a, c, g, or t
  misc_feature (962)..(962): n is a, c, g, or t
  misc_feature (965)..(965): n is a, c, g, or t
  misc_feature (972)..(972): n is a, c, g, or t
  misc_feature (975)..(975): n is a, c, g, or t
  misc_feature (978)..(979): n is a, c, g, or t
  misc_feature (992)..(992): n is a, c, g, or t
  misc_feature (995)..(995): n is a, c, g, or t
  misc_feature (1001)..(1001): n is a, c, g, or t
  misc_feature (1003)..(1007): n is a, c, g, or t
  misc_feature (1009)..(1009): n is a, c, g, or t
  misc_feature (1012)..(1016): n is a, c, g, or t
tagagaaattactatggagaggatcgcatcaccatcaccatcacggatcctatttaggtgacactatagaatcgtcgacccacgcgtccgcactgcgccagcaggacttcaccagggccatcctcatggccctccggctcaacgagagcaaactggtgcaggaggccctggaggcggtgcccaggggcgagattgaagtggtcacctcctcccttcctgaactgtatgtggagaaagtgctggagtttttagcttcctcctttgaagtgtctcgccacctggaattctacctcctctggactcacaaactgctcatgttgcacggacagaagctgaagtccagagccgggacgctgctgcctgtcattcagttcctccagaagagcatccagcggcacctggacgacctgtcgaaactctgtagctggaaccactataacatgcagtacgcactagcagtttccaagcagcggggcacaaaacgctccctagacccgctgggaagtgaggaggaggcagaagcatctgaagatgacagcctgcatctgcttggaggaggaggcagagactcagaagaagagatgctggcctagagccagccggttgcagcgttggattgtgccggctaagacctgccagggagatgggacccttgtgccacctgggccagcaaagaggaggggtccagagaacagctgaaatactgtcactagtggtagtgacttgcttttcctgtgcacacatgtancccatcaggacagcgagccgacgggtcacgccaggggccggcacgcactggcacctggccccaggagcgggggccgtgtgaacggtgatgaatgttgaaaatgcgtctcananaggtattcacatgaactttgtatgaaacttatttatatttttaacataaaggtttganaaaaaaanttagggattaaaaaaanatggagtttttctaacgngangaagaantcnacnnttcaaattaaaanggnttatgntnnnnnanaannnnn

SEQ ID NO: 449 - DNA, 772 bp, Homo Sapiens
  misc_feature (5)..(5): n is a, c, g, or t
gaganattactatgagaggatcgcatcaccatcaccatcacggatcctatttaggtgacactatagaatcgtcgacccacgcgtccgcttaggcgcagacggggaagcggagccaacatgccagtggcccggagctgggtttgtcgcaaaacttatgtgaccccgcggagacccttcgagaaatctcgtctcgaccaagagctgaagctgatcggcgagtatgggctccggaacaaacgtgaggtctggagggtcaaatttaccctggccaagatccgcaaggccgcccgggaactgctgacgcttgatgagaaggacccacggcgtctgttcgaaggcaacgccctgctgcggcggctggtccgcattggggtgctggatgagggcaagatgaagctggattacatcctgggcctgaagatagaggatttcttagagagacgcctgcagacccaggtcttcaagctgggcttggccaagtccatccaccacgctcgcgtgctgatccgccagcgccatatcagggtccgcaagcaggtggtgaacatcccgtccttcattgtccgcctggattcccagaagcacatcgacttctctctgcgctctccctacgggggtggccgcccgggccgcgtgaagaggaagaatgccaagaagggccagggtggggctggggctggagacgacgaggaggaggattaagtccacctgtccctcctgggctgctggattgtctcgttttcctgccaaataaacaggatcagcgctttac

SEQ ID NO: 450 - DNA, 1315 bp, Homo Sapiens
  misc_feature (827)..(827): n is a, c, g, or t
  misc_feature (883)..(883): n is a, c, g, or t
  misc_feature (900)..(900): n is a, c, g, or t
  misc_feature (926)..(926): n is a, c, g, or t
  misc_feature (954)..(954): n is a, c, g, or t
  misc_feature (970)..(970): n is a, c, g, or t
  misc_feature (977)..(977): n is a, c, g, or t
  misc_feature (1000)..(1000): n is a, c, g, or t
  misc_feature (1014)..(1014): n is a, c, g, or t
  misc_feature (1020)..(1020): n is a, c, g, or t
  misc_feature (1038)..(1038): n is a, c, g, or t
  misc_feature (1059)..(1059): n is a, c, g, or t
  misc_feature (1073)..(1074): n is a, c, g, or t
  misc_feature (1077)..(1077): n is a, c, g, or t
  misc_feature (1088)..(1088): n is a, c, g, or t
  misc_feature (1090)..(1090): n is a, c, g, or t
  misc_feature (1094)..(1094): n is a, c, g, or t
  misc_feature (1107)..(1107): n is a, c, g, or t
  misc_feature (1110)..(1110): n is a, c, g, or t
  misc_feature (1121)..(1121): n is a, c, g, or t
  misc_feature (1127)..(1127): n is a, c, g, or t
  misc_feature (1133)..(1133): n is a, c, g, or t
  misc_feature (1137)..(1137): n is a, c, g, or t
  misc_feature (1147)..(1147): n is a, c, g, or t
  misc_feature (1154)..(1154): n is a, c, g, or t
  misc_feature (1157)..(1157): n is a, c, g, or t
  misc_feature (1159)..(1159): n is a, c, g, or t
  misc_feature (1180)..(1181): n is a, c, g, or t
  misc_feature (1183)..(1183): n is a, c, g, or t
  misc_feature (1205)..(1205): n is a, c, g, or t
  misc_feature (1211)..(1211): n is a, c, g, or t
  misc_feature (1215)..(1215): n is a, c, g, or t
  misc_feature (1227)..(1227): n is a, c, g, or t
  misc_feature (1234)..(1234): n is a, c, g, or t
  misc_feature (1240)..(1240): n is a, c, g, or t
  misc_feature (1276)..(1276): n is a, c, g, or t
  misc_feature (1279)..(1279): n is a, c, g, or t
  misc_feature (1286)..(1286): n is a, c, g, or t
  misc_feature (1295)..(1295): n is a, c, g, or t
  misc_feature (1297)..(1298): n is a, c, g, or t
  misc_feature (1300)..(1300): n is a, c, g, or t
  misc_feature (1303)..(1315): n is a, c, g, or t
agagaaattactatgagaggatcgcatcaccatcaccatcacggatcctatttaggtgacactatagaatcgtcgacccacgcgtccgcaccagtgcgcccgccggagggtgtttatcgcggctagagagatgtcgctgctgcggtcgctgcgcgtgtttctggtcgcgcggaccgggagctacccggctgggtctcttctgcgtcagtcgccccagccaaggcacacattttatgctgggccccgtctgtctgcctcggcctccagcaaggagctcctcatgaagctgcggcggaaaacaggctactcctttgtaaattgcaagaaagctctggagacttgtggcggggacctcaaacaggcagagatctggctccacaaggaggcccagaaggagggctggagcaaagctgccaagctccaagggaggaagaccaaagaaggcctgattgggctgttgcaggaaggaaacacaactgtattagtagaggtaaactgtgagacagattttgtttctagaaatttaaaatttcaactgttggtccagcaagtagcccttggaaccatgatgcattgtcagaccctaaaggatcaaccctctgcatacagtaaaggtttcttgaattcctctgagctttctggacttccagctgggcctgacagagaaggctcactcaaggatcagttggctttagcaattggaaaactgggagaaaacatgattcttaaacgagctgcatgggtgaaggtgccatctgggttctacgttggctcttatgtccacggagcaatgcagagtccctcacttcacaagctggtgctggggnaagtatgggggccctggtcatctgtgagacgtctgaacagaaaacaaaccttgaanacgttggccgccccccnttgggcaaccatgtggtgggcatggncccccctctctgttggctccctggaacnaatgaaccctgggggnaaaggcnaaaaaataaaaatgctgtcccanccgtattttgctgnatcccnccattaccttgggggcantatgtgcaaccctcagggggngtcggtaagaaaannttnggcggtttgantntggnaaaaggtgaaaangcnccaaaaacttnaaaagnttcccnaaanttttggcccnaagaagnaananttacttttaacccccgggacnncnttacaaaaagggaattttcccnaacccncttncaaccgaaaagncgggggnaaaatnttaaaaaaattgtaaaaaaaaaaaaattttttcttnttnggccccnaaaaaaaanannanaannnnnnnnnnnnn

SEQ ID NO: 451 - DNA, 802 bp, Homo Sapiens
  misc_feature (777)..(778): n is a, c, g, or t
  misc_feature (781)..(791): n is a, c, g, or t
  misc_feature (794)..(802): n is a, c, g, or t
tagagagaattactatgaagaggatcgcatcaccatcaccatcacggatcctatttaggtgacactatagaatcgtcgacccacgcgtccggagagaacagggcagttatccattatagggatgatgagaccatgtatgttgagtctaaaaaggacagagtcacagtagtcttcagcacagtgtttaaggatgacgacgatgtggtcattggaaaggtgttcatgcaggagttcaaagaaggacgcagagccagccacacagccccacaggtcctctttagccacagggaacctcctctggagctgaaagacacagacgccgctgtgggtgacaacattggctacattacctttgtgctgttccctcgtcacaccaatgccagtgctcgagacaacaccatcaacctgatccacacgttccgggactacctgcactaccacatcaagtgctctaaggcctatattcacacacgtatgcgggcgaaaacgtctgacttcctcaaggtgctgaaccgcgcacgcccagatgccgagaaaaaagaaatgaaaacaatcacggggaagacgttttcatcccgctaatcttgggaataagaggaggaagcggctggcaactgaaggctggaacacttgctactggataatcgtagcttttaatgttgcgcctcttcaggttcttaagggattctccgttttggttccattttgtacacgtttggaaaataatctgcagaaacgagctgtgcttgcaaagacttcatagttcccaagaattannaannnnnnnnnnngannnnnnnnn

SEQ ID NO: 452 - DNA, 1190 bp, Homo Sapiens
  misc_feature (895)..(895): n is a, c, g, or t
  misc_feature (905)..(905): n is a, c, g, or t
  misc_feature (962)..(962): n is a, c, g, or t
  misc_feature (967)..(967): n is a, c, g, or t
  misc_feature (969)..(969): n is a, c, g, or t
  misc_feature (1000)..(1000): n is a, c, g, or t
  misc_feature (1004)..(1004): n is a, c, g, or t
  misc_feature (1018)..(1018): n is a, c, g, or t
  misc_feature (1041)..(1041): n is a, c, g, or t
  misc_feature (1046)..(1046): n is a, c, g, or t
  misc_feature (1052)..(1052): n is a, c, g, or t
  misc_feature (1066)..(1066): n is a, c, g, or t
  misc_feature (1070)..(1070): n is a, c, g, or t
  misc_feature (1077)..(1077): n is a, c, g, or t
  misc_feature (1098)..(1098): n is a, c, g, or t
  misc_feature (1107)..(1107): n is a, c, g, or t
  misc_feature (1110)..(1110): n is a, c, g, or t
  misc_feature (1123)..(1123): n is a, c, g, or t
  misc_feature (1125)..(1125): n is a, c, g, or t
  misc_feature (1129)..(1130): n is a, c, g, or t
  misc_feature (1134)..(1134): n is a, c, g, or t
  misc_feature (1138)..(1138): n is a, c, g, or t
  misc_feature (1144)..(1144): n is a, c, g, or t
  misc_feature (1151)..(1151): n is a, c, g, or t
  misc_feature (1159)..(1159): n is a, c, g, or t
  misc_feature (1161)..(1162): n is a, c, g, or t
  misc_feature (1165)..(1165): n is a, c, g, or t
  misc_feature (1169)..(1169): n is a, c, g, or t
  misc_feature (1174)..(1174): n is a, c, g, or t
  misc_feature (1188)..(1188): n is a, c, g, or t
tagagaaattactatgagaggatcgcatcaccatcaccatcacggatcctatttaggtgacactatagaatcgtcgacccacgcgtccgaccaggagcacattctgcgctttgcctcttgggctctggagagtgacaacaacacagcccttttgctttctaagaagttgatctacttccagctgcaccgggccctcaagatgattgtggatcccgtggagccacatggcgagatgaagtttcagtgggacctcaatgcctggaccaagagtgccgaggcctttggcaagattgtggcagagcgtcctggcactaactcaacaggccctgcacccatggcccctccaagagccccagggcccctgagcaagcagggctctggcagcagccagcccatggaggtgcaggaaggctatggctttgggtcaggagatgatccctactcaagtgcagagccccatgtgtcaggtgtgaaacggtcccgctcaggtgagggcgaggtgagcggccttatgcgcaaggtgccacgagtgagccttgaacgcctggacctggacctcacagctgacagccagccacccgtcttcaaggtcttcccaggcagtaccactgaggactacaaccttattgttattgaacgtggcgctgccgctgcagctaccggccagccagggactgcgcctgcaggaacccctggtgccccacccctggctggcatggccattgtcaaggaggaggagacggaggctgccattggagcccctcctactgccactgagggccctgagaccaaacctgtgcttatggctcttgcggagggtcctggtgctgagggtccccgcctggcctcacctagtggcagcaccagctcagggctggaggtggtggctcctganggtacctcanccccaggtggtggcccgggaaccctggatgacagtgccaccatttgccgtgtctgcnaaaancnagccgatctggttatgtgcaaccagtgtgantttngtttccacctggantgtcacctgccggccctgcagangtacnagggangaatgaactgctcnctcngccatgngctcctgactgaagaagaganggcaccccnccnggaggggcaaaancntggnngggncaanttcccncccaccncgaaatgnannggnatgntggcnatttgtcaaaccgncc

SEQ ID NO: 453 - DNA, 1112 bp, Homo Sapiens
  misc_feature (1)..(1): n is a, c, g, or t
  misc_feature (5)..(5): n is a, c, g, or t
  misc_feature (913)..(913): n is a, c, g, or t
  misc_feature (936)..(936): n is a, c, g, or t
  misc_feature (970)..(970): n is a, c, g, or t
  misc_feature (989)..(989): n is a, c, g, or t
  misc_feature (993)..(994): n is a, c, g, or t
  misc_feature (1028)..(1028): n is a, c, g, or t
  misc_feature (1042)..(1042): n is a, c, g, or t
  misc_feature (1059)..(1062): n is a, c, g, or t
  misc_feature (1077)..(1077): n is a, c, g, or t
  misc_feature (1083)..(1083): n is a, c, g, or t
  misc_feature (1091)..(1092): n is a, c, g, or t
  misc_feature (1094)..(1094): n is a, c, g, or t
  misc_feature (1097)..(1097): n is a, c, g, or t
  misc_feature (1104)..(1104): n is a, c, g, or t
  misc_feature (1108)..(1108): n is a, c, g, or t
  misc_feature (1111)..(1111): n is a, c, g, or t
naatngagaaattactatgagaggatcgcatcaccatcaccatcacggatcctatttaggtgacactatagaatcgtcgacccacgcgtccgagtttgggctgaaaagcattattggcatgggaacaggagcaggcgcctacatcctaactcgatttgctctaaacaaccctgagatggtggagggccttgtccttatcaacgtgaacccttgtgcggaaggctggatggactgggccgcctccaagatctcaggatggacccaagctctgccggacatggtggtgtcccacctttttgggaaggaagaaatgcagagtaacgtggaagtggtccacacctaccgccagcacattgtgaatgacatgaaccccggcaacctgcacctgttcatcaatgcctacaacagccggcgcgacctggagattgagcgaccaatgccgggaacccacacagtcaccctgcagtgccctgctctgttggtggttggggacagctcgcctgcagtggatgccgtggtggagtgcaactcaaaattggacccaacaaagaccactctcctcaagatggcggactgtggcggcctcccgcagatctcccagccggccaagctcgctgaggccttcaagtacttcgtgcagggcatgggatacatgccctcggctagcatgacccgcctgatgcggtcccgcacagcctctggttccagcgtcacttctctggatggcacccgcagccgctcccacaccagcgagggcacccgaagccgctcccacaccagcgagggcacccgcagccgctcgcacaccagcgagggggcccacctggacatcacccccaactcgggtgctgctgggaacagcgccgggcccaagtccatggaggtctcctgctaggcggcctgccagctgccncccccggactctgatctctgtantggccccctcctccccggccccttttcccccccntgcctgccaaactgggccntaanncgtattattccaaaccttatttttaaaaaatganctctgggggaaaanaaatgaaggtctattannnnggggggccccctccnaaaggnggggtggnngnggnaccaagnaagnaanc

SEQ ID NO: 454 - DNA, 1179 bp, Homo Sapiens
  misc_feature (2)..(2): n is a, c, g, or t
  misc_feature (4)..(5): n is a, c, g, or t
  misc_feature (738)..(738): n is a, c, g, or t
  misc_feature (908)..(908): n is a, c, g, or t
  misc_feature (928)..(928): n is a, c, g, or t
  misc_feature (940)..(940): n is a, c, g, or t
  misc_feature (945)..(945): n is a, c, g, or t
  misc_feature (950)..(950): n is a, c, g, or t
  misc_feature (970)..(970): n is a, c, g, or t
  misc_feature (979)..(979): n is a, c, g, or t
  misc_feature (990)..(990): n is a, c, g, or t
  misc_feature (1001)..(1001): n is a, c, g, or t
  misc_feature (1013)..(1013): n is a, c, g, or t
  misc_feature (1019)..(1019): n is a, c, g, or t
  misc_feature (1042)..(1042): n is a, c, g, or t
  misc_feature (1047)..(1047): n is a, c, g, or t
  misc_feature (1053)..(1053): n is a, c, g, or t
  misc_feature (1055)..(1055): n is a, c, g, or t
  misc_feature (1059)..(1059): n is a, c, g, or t
  misc_feature (1070)..(1070): n is a, c, g, or t
  misc_feature (1075)..(1075): n is a, c, g, or t
  misc_feature (1086)..(1086): n is a, c, g, or t
  misc_feature (1089)..(1089): n is a, c, g, or t
  misc_feature (1094)..(1094): n is a, c, g, or t
  misc_feature (1097)..(1097): n is a, c, g, or t
  misc_feature (1107)..(1107): n is a, c, g, or t
  misc_feature (1112)..(1112): n is a, c, g, or t
  misc_feature (1128)..(1128): n is a, c, g, or t
  misc_feature (1133)..(1133): n is a, c, g, or t
  misc_feature (1137)..(1137): n is a, c, g, or t
  misc_feature (1153)..(1153): n is a, c, g, or t
  misc_feature (1160)..(1160): n is a, c, g, or t
  misc_feature (1168)..(1168): n is a, c, g, or t
anannagagaaattactatgagaggatcgcatcaccatcaccatcacggatcctatttaggtgacactatagaatcgtcgacccacgcgtccggggtgaaagctcatgaactcaaggagcacaacggacacatcacaggtattgactgggctcccaagagcgaccgcattgtcacttgtggggcagaccgcaatgcctatgtctggagtcagaaagatggtgtttggaagccaaccctggtgatcctgagaattaatcgcgcagctacttttgtgaagtggtcccccctagagaacaaatttgctgtgggaagtggagcacgactcatttctgtttgttactttgagtctgaaaatgactggtgggtgagcaagcacattaaaaagccgattcgctccacagtcctcagcttggattggcatcccaacaacgttttgctggcagcaggatcatgtgacttcaaatgcagagtgttttctgcctacattaaagaagtggatgaaaagccagccagcacgccctggggcagcaagatgccttttgggcagctgatgtcagagtttggtggcagtggcactggtggctgggtccacggggtaagcttctctgccagtgggagccgcctggcctgggtcagccacgacagcaccgtgtctgttgctgatgcctcaaaaagtgtgcaggtctcgactctgaagacagagttcctgccgctcctaagtgtgtcatttgtctcanagaacagcgtcgtggctgctggccatgactgctgcccaatgctctttaactacgatgaccgcggctgcctgaccttcgtctccaagttagatattccaaaacagagcatccaacgcaacatgtctgccatggaacgcttccgcaacatggacaagaaagccacaactgangaccgcacacggccttgganacgctgcaccanaatancatcnctcaagtctctatttatgangtggaaaancaaaattgtcncaaattttgcnctactggcatcnatgganccatgaaatttggggattcaaancctcnagtctncntccnggcctccgaanatggnaactgaatganccnccccntcnaaatgaaaantgggnccaacccacttttccnggccnaggnaagaaacccccccagnaaacctnaaaacatncccccaaggcc

SEQ ID NO: 455 - DNA, 1041 bp, Homo Sapiens
  misc_feature (825)..(825): n is a, c, g, or t
  misc_feature (843)..(843): n is a, c, g, or t
  misc_feature (866)..(866): n is a, c, g, or t
  misc_feature (889)..(889): n is a, c, g, or t
  misc_feature (893)..(893): n is a, c, g, or t
  misc_feature (895)..(895): n is a, c, g, or t
  misc_feature (901)..(901): n is a, c, g, or t
  misc_feature (904)..(904): n is a, c, g, or t
  misc_feature (912)..(912): n is a, c, g, or t
  misc_feature (921)..(921): n is a, c, g, or t
  misc_feature (923)..(923): n is a, c, g, or t
  misc_feature (925)..(925): n is a, c, g, or t
  misc_feature (929)..(929): n is a, c, g, or t
  misc_feature (935)..(935): n is a, c, g, or t
  misc_feature (941)..(942): n is a, c, g, or t
  misc_feature (965)..(965): n is a, c, g, or t
  misc_feature (972)..(972): n is a, c, g, or t
  misc_feature (998)..(998): n is a, c, g, or t
  misc_feature (1003)..(1003): n is a, c, g, or t
  misc_feature (1027)..(1027): n is a, c, g, or t
  misc_feature (1032)..(1032): n is a, c, g, or t
  misc_feature (1034)..(1035): n is a, c, g, or t
  misc_feature (1041)..(1041): n is a, c, g, or t
tagaggaaattactatggagaggatcgcatcaccatcaccatcacggatcctatttaggtgacactatagaatcgtcgacccacgcgtccgatcaccagcagcatccacttcgaggcgtaccgtgtgaagcgcctcaacgagggcagcagcgccatggccaacggcgtggaggagaaggagccagaagccccggagatgtagacgccaccctgcccacccccgggatcctgcccccaagtcatttccgtcccccccccaggccctcccaccaccccattttattttatatgattttctccatttgtcatcgttccccaccccttcgacatgctgccaggaaacaagggaaggggcctccctccgagtgagtcagtgatgaggccgcggcctccccgaggttgtggggaggctgcactggagccacaggcaggggtgagagcacccactgaattgacatgaccctctgtccccaggcctggctccccgagggctcagaagagcagcttcggtgtgcagatcatccgtctgtgtggggttctcagtgccggaggccttggggtgggggccaggcctcgcacttgcagaggagcccagtgggctgcacgctcccctccatccccatcggccctgtcccctggagtgtgtcagagcccaggggagaatgcagcccaccaggagcacctggaccccctgcccgccacatggtgtggccatcactcagcccctacccctgccctgctcctaagggtagaaaactccagggtcccctgccaccgactgcccagccactccaagccccctggcagctgcccctcctggagcanaaagtgcctttatctcanccatccgcaaactgcttggccanatgcggggacaggctggaatganggangngtcttnatntccttggnatccccctntnangcanccccgnccccanngggctgcaggtgctgctgatgcnctggatntgattgaggataaaaaggaaggaaanatganccctacccctcatcccccattttnaaaangnntaaacn

SEQ ID NO: 456 - DNA, 1000 bp, Homo Sapiens
  misc_feature (783)..(783): n is a, c, g, or t
  misc_feature (800)..(800): n is a, c, g, or t
  misc_feature (805)..(805): n is a, c, g, or t
  misc_feature (859)..(859): n is a, c, g, or t
  misc_feature (908)..(908): n is a, c, g, or t
  misc_feature (922)..(922): n is a, c, g, or t
  misc_feature (940)..(940): n is a, c, g, or t
  misc_feature (945)..(946): n is a, c, g, or t
  misc_feature (952)..(952): n is a, c, g, or t
  misc_feature (955)..(955): n is a, c, g, or t
  misc_feature (960)..(962): n is a, c, g, or t
  misc_feature (975)..(976): n is a, c, g, or t
  misc_feature (992)..(992): n is a, c, g, or t
  misc_feature (995)..(996): n is a, c, g, or t
  misc_feature (1000)..(1000): n is a, c, g, or t
aatagagaaattactatgagaggatcgcatcaccatcaccatcacggatcctatttaggtgacactatagaatcgtcgacccacgcgtccgctccggggagcagctcctgtggggcagaacggctacacacagttgggggacctggctcagcccggccccgagctttctcccacagcggggtacacagcctggacggcggagaagtagacagtcaggcgctacaggaactgacgcagatggtgtctggccctgcatcgtactctggcccaaagccttctacccagtatggagctccaggaccctttgcagcccctggtgagggaggtgccttggcggccactgggcggcccccgctgctgcccacccgagcttctcgttctcagcgtgcggccagtgaggacatgacgagtgatgaggagcgcatggtcatctgtgaggaggaaggggatgatgatgtcattgctgacgatggcttcggcaccactgacattgatctcaagtgcaaggagcgggtgaccgacagcgagagtggggacagctctggggaggacccagagggcaacaagggctttggtcggaaggtgttttcacctgtgatccgttcctcctttacccactgccgccccccactggaccctgagcccccagggcccccggatcctcctgtagcctttggcaaaggctatggttccgccccatcctcctctgcgtcctcgcctgcttcctcctcagcctcggcagccacctccttctcactgggctcaggaaccttcaaggcccangagtctggtcagggcancacancgggccccctacggcccccaccccctggggctgggggtccagcgacaccttccnaaggcaacccggttcctcccaatggatcctgccacctttccggcgcaanaaacccaaaagtgngggttggcctggaaaccnaccanncccctnaantcatnnnggccccctcccannggaagaagaaacttcntgnnaaan

SEQ ID NO: 457 - DNA, 1175 bp, Homo Sapiens
  misc_feature (1)..(1): n is a, c, g, or t
  misc_feature (15)..(15): n is a, c, g, or t
  misc_feature (17)..(17): n is a, c, g, or t
  misc_feature (878)..(878): n is a, c, g, or t
  misc_feature (885)..(885): n is a, c, g, or t
  misc_feature (908)..(908): n is a, c, g, or t
  misc_feature (940)..(940): n is a, c, g, or t
  misc_feature (965)..(965): n is a, c, g, or t
  misc_feature (967)..(967): n is a, c, g, or t
  misc_feature (1007)..(1007): n is a, c, g, or t
  misc_feature (1020)..(1020): n is a, c, g, or t
  misc_feature (1038)..(1038): n is a, c, g, or t
  misc_feature (1045)..(1046): n is a, c, g, or t
  misc_feature (1054)..(1054): n is a, c, g, or t
  misc_feature (1066)..(1066): n is a, c, g, or t
  misc_feature (1074)..(1074): n is a, c, g, or t
  misc_feature (1080)..(1080): n is a, c, g, or t
  misc_feature (1086)..(1086): n is a, c, g, or t
  misc_feature (1089)..(1089): n is a, c, g, or t
  misc_feature (1101)..(1101): n is a, c, g, or t
  misc_feature (1104)..(1104): n is a, c, g, or t
  misc_feature (1108)..(1108): n is a, c, g, or t
  misc_feature (1115)..(1115): n is a, c, g, or t
  misc_feature (1118)..(1118): n is a, c, g, or t
  misc_feature (1128)..(1128): n is a, c, g, or t
  misc_feature (1135)..(1135): n is a, c, g, or t
  misc_feature (1140)..(1140): n is a, c, g, or t
  misc_feature (1156)..(1157): n is a, c, g, or t
  misc_feature (1163)..(1165): n is a, c, g, or t
naatagagaaattancnatgagaggatcgcatcaccatcaccatcacggatcctatttaggtgacactatagaatcgtcgacccacgcgtccgagcgcccgagccgcggccctcgagacgggaccgagagcatcatgggcagcactgtcccgcgctccgcctccgtgctgcttctgctgctgctcctgcgccgggccgagcagccctgcggggccgagctcaccttcgagctgccggacaacgccaagcagtgcttccacgaggaggtggagcagggcgtgaagttctccctggattaccaggtcatcactggaggccactacgatgttgactgctatgtagaggacccccaggggaacaccatctacagagaaacgaagaagcagtacgacagcttcacgtaccgggctgaagtcaagggcgtttatcatttttgcttcagtaatgagttttccaccttctctcacaagaccgtctactttgactttcaagtgggcgatgagcctcccattctcccagacatggggaacagggtcacagctctcacccagatggagtccgcctgcgtgaccatccatgaggctctgaaaacggtgattgactcccagacgcattaccggctgcgggaggcccaggaccgggcccgagcggaagaccttaatagccgagtctcttactggtctgttggcgagacgattgccctgttcgtggtcagcttcagtcaggtgctactgttgaaaagcttcttcacagaaaaacgacccatcagcagggcagtccactcctagccccggcatcctgctctagggcccctcatgccccaggctggagcagctctcctaggtcacagcctgctggggctgggtcgcgtaacccanggtggangcagaacgatgctgctgtggtanccctttgcctttcatgcccatgcttgattctngcacctcagcagctgaaggtctcananaccagtaatcaaaaggcatccgactgcattaagtgggcancgctgaaaaaaantttacaactaggccaggnataaccnntgtgggangggggaaagggnaagggttnaatggncctggnttnttggcaggaaantcnaatngcccagnccntttggggaanttaaggncccgncccttttttttgaagnngggggnnnttttttttgg

SEQ ID NO: 458 - DNA, 970 bp, Homo Sapiens
actatgagaggtcgcatcaccatcaccatcacggatcctatttaggtgacactatagaatcgtcgacccacgcgtccggagtaggcaacatattcattaaaaatctggacaaatccattgataataaagcactgtatgatacattttctgcttttggtaacatcctttcatgtaaggtggtttgtgatgaaaatggttccaagggctatggatttgtacactttgagacgcaggaagcagctgaaagagctattgaaaaaatgaatggaatgctcctaaatgatcgcaaagtatttgttggacgatttaagtctcgtaaagaacgagaagctgaacttggagctagggcaaaagaattcaccaatgtttacatcaagaattttggagaagacatggatgatgagcgccttaaggatctctttggcaagtttgggcctgccttaagtgtgaaagtaatgactgatgaaagtggaaaatccaaaggatttggatttgtaagctttgaaaggcatgaagatgcacagaaagctgtggatgagatgaacggaaaggagctcaatggaaaacaaatttatgttggtcgagctcagaaaaaggtggaacggcagacggaacttaagcgcaaatttgaacagatgaaacaagataggatcaccagataccagggtgttaatctttatgtgaaaaatcttgatgatggtattgatgatgaacgtctccggaaagagttttctccatttggtacaatcactagtgcaaaggttatgatggagggtggtcgcagcaaagggtttggttttgtatgtttctcctccccagaagaagccactaaagcagttacagaaatgaacggtagaattgtggccacaaagccattgtatgtagctttagctcagcgcaaagaagagcgccaggctcacctcactaaccagtatatgcagagaatggcaagtgtacgagctgttcccaa

SEQ ID NO: 459 - DNA, 1184 bp, Homo Sapiens
  misc_feature (871)..(871): n is a, c, g, or t
  misc_feature (884)..(884): n is a, c, g, or t
  misc_feature (891)..(891): n is a, c, g, or t
  misc_feature (942)..(942): n is a, c, g, or t
  misc_feature (1011)..(1011): n is a, c, g, or t
  misc_feature (1024)..(1024): n is a, c, g, or t
  misc_feature (1030)..(1030): n is a, c, g, or t
  misc_feature (1037)..(1037): n is a, c, g, or t
  misc_feature (1041)..(1041): n is a, c, g, or t
  misc_feature (1043)..(1043): n is a, c, g, or t
  misc_feature (1052)..(1052): n is a, c, g, or t
  misc_feature (1067)..(1067): n is a, c, g, or t
  misc_feature (1076)..(1076): n is a, c, g, or t
  misc_feature (1080)..(1080): n is a, c, g, or t
  misc_feature (1112)..(1112): n is a, c, g, or t
  misc_feature (1118)..(1118): n is a, c, g, or t
  misc_feature (1120)..(1120): n is a, c, g, or t
  misc_feature (1123)..(1123): n is a, c, g, or t
  misc_feature (1129)..(1129): n is a, c, g, or t
  misc_feature (1132)..(1132): n is a, c, g, or t
  misc_feature (1137)..(1137): n is a, c, g, or t
  misc_feature (1144)..(1144): n is a, c, g, or t
  misc_feature (1146)..(1146): n is a, c, g, or t
  misc_feature (1150)..(1151): n is a, c, g, or t
  misc_feature (1153)..(1153): n is a, c, g, or t
  misc_feature (1170)..(1170): n is a, c, g, or t
  misc_feature (1174)..(1174): n is a, c, g, or t
  misc_feature (1183)..(1183): n is a, c, g, or t
gagaaattactatgagaggatcgcatcaccatcaccatcacggatcctatttaggtgacactatagaatcgtcgacccacgcgtccgggcaagcagaagtgacccgtctcttgctggagggaatcagtagcactcacgtgaaccacctgcgctgcctccacgagttcgtcaagtctcagacaacctactacgcacagtgctaccgccacatgctggacttgcagaagcagctgggcagatttcccggcaccttcgtgggcaccacagagcccgcctccccacccctgagcagcacctcacccaccactgctgcggccactatgcctgtggtgccctctgtggccagcctggcccctccgggggaggcctcgctctgcctggaagaggtggccccccctgccagtgggacccgcaaagctcgggtgctctatgactacgaggcagccgacagcagtgagctggccctgctggctgatgagctcatcactgtctacagcctgcctggcatggaccctgactggctcattggcgagagaggcaacaagaagggcaaggtccctgtcacctacttggaactgctcagctaggcaggtgcccccatcccccccgcattctggcctaggcaggagaggatgggcgcagccctgccacttaacttgtttgttggtgacacagttgttcagagtggggagaattcaccccattctgtccctgcccctagtcacctagctgtgagggtgcctgaggctgaatggctccacccctcccccagccctgcttctgacctgtggctctggagcccctgcccctgcctgcatccccgagcaccccaccctccaggctccactaaggagggaggggctgtctgcancagctgcactcancacctangccagggtggggccgccgcaaatgggctcaggaaaccccaggtgcactcancgagagccctgcctttcagttgccaaaagctgcatcaggggaatgcggcaaggcacaaagggctctggnaacccctggggantgggcnctgcccntggnangggaaaacntggccaaggctggtnttgggcccngaanaacattttcgggggtatcctcccctccacccntcaaantnaancaaatncanggccnttcccanangganncnaataaacttaataactnactnggaatcctnt

SEQ ID NO: 460 - DNA, 1179 bp, Homo Sapiens
  misc_feature (783)..(783): n is a, c, g, or t
  misc_feature (831)..(831): n is a, c, g, or t
  misc_feature (837)..(837): n is a, c, g, or t
  misc_feature (851)..(851): n is a, c, g, or t
  misc_feature (858)..(858): n is a, c, g, or t
  misc_feature (890)..(890): n is a, c, g, or t
  misc_feature (900)..(900): n is a, c, g, or t
  misc_feature (908)..(908): n is a, c, g, or t
  misc_feature (920)..(920): n is a, c, g, or t
  misc_feature (922)..(922): n is a, c, g, or t
  misc_feature (970)..(970): n is a, c, g, or t
  misc_feature (992)..(992): n is a, c, g, or t
  misc_feature (1003)..(1003): n is a, c, g, or t
  misc_feature (1008)..(1008): n is a, c, g, or t
  misc_feature (1014)..(1014): n is a, c, g, or t
  misc_feature (1016)..(1016): n is a, c, g, or t
  misc_feature (1038)..(1039): n is a, c, g, or t
  misc_feature (1053)..(1053): n is a, c, g, or t
  misc_feature (1062)..(1062): n is a, c, g, or t
  misc_feature (1068)..(1068): n is a, c, g, or t
  misc_feature (1073)..(1073): n is a, c, g, or t
  misc_feature (1080)..(1080): n is a, c, g, or t
  misc_feature (1102)..(1102): n is a, c, g, or t
  misc_feature (1107)..(1108): n is a, c, g, or t
  misc_feature (1119)..(1119): n is a, c, g, or t
  misc_feature (1125)..(1125): n is a, c, g, or t
  misc_feature (1130)..(1130): n is a, c, g, or t
  misc_feature (1133)..(1133): n is a, c, g, or t
  misc_feature (1137)..(1137): n is a, c, g, or t
  misc_feature (1143)..(1143): n is a, c, g, or t
  misc_feature (1146)..(1146): n is a, c, g, or t
  misc_feature (1153)..(1153): n is a, c, g, or t
  misc_feature (1163)..(1163): n is a, c, g, or t
  misc_feature (1167)..(1167): n is a, c, g, or t
  misc_feature (1172)..(1172): n is a, c, g, or t
aaaatagagaaattactatgagaggatcgcatcaccatcaccatcacggatcctatttaggtgacactatagaatcgtcgacccacgcgtccgcacttcccccagcaggccgtcatgctgcatactctgtaggttgggagatggcacctgcgggggcacctgggcccggccgcctggtagcccagctggacacagagggtgtgggcagcctgggccctggctatgagggccgacacattgccatggagaaggtggcatccagaacataccggctacggctagaggctgccaggcctggtgatgcgggcacctaccgctgcctcgccaaagcctatgttcgagggtctgggacccggcttcgtgaagcagccagtgcccgttcccggcctctccctgtacacgtgcgggaggaaggtgagagggggctgggccctggacggggttcgaggattgtcaaccccttttccttctgtttccatgacccctccctctccgtcagctgtttgcaggccacagcctcacgctcctcttctaccaagattgtgggaataccctgagtttcctggggcggtgcttggcggcagccctaaccccatgctccctggccctgcaccctctgaccccatgtcctttgttctgcaggtgtggtgctggaagctgtggcatggctagcaggaggcacagtgtaccgcggggagactgcctccctgctgtgcaacatctctgtgcggggtggccccccaggactgcggctggccgccagctggtgggtggagcgaccanaggacggagagctcagctctgtccctgcccagctggtgggtggcgtangccagnatggtgtggcaaanctgggantccggcctggaagaagccctgtcaacgtaaanctggtggggnccccgaanccatcggctganantacacacttggggccccaagaataaaggcgtgtacactgtgcccccancgcctgggtgcaacatgccaantaaaagctggnacaangcgggnantgcccgctcaggcctgttaaannctaaccctaaatgnatgcctggnaaaccnaattnggccctngctgggggaaaaggggtggccnaatcnnggggccaatgncttggnaacanaanttgntgcttnaanaaaaagncttcaaaaangggnatccntttaccc

SEQ ID NO: 461 - DNA, 1181 bp, Homo Sapiens
  misc_feature (1)..(1): n is a, c, g, or t
  misc_feature (380)..(380): n is a, c, g, or t
  misc_feature (758)..(758): n is a, c, g, or t
  misc_feature (802)..(802): n is a, c, g, or t
  misc_feature (842)..(842): n is a, c, g, or t
  misc_feature (869)..(869): n is a, c, g, or t
  misc_feature (894)..(894): n is a, c, g, or t
  misc_feature (922)..(922): n is a, c, g, or t
  misc_feature (929)..(929): n is a, c, g, or t
  misc_feature (944)..(944): n is a, c, g, or t
  misc_feature (947)..(947): n is a, c, g, or t
  misc_feature (983)..(983): n is a, c, g, or t
  misc_feature (1012)..(1012): n is a, c, g, or t
  misc_feature (1014)..(1014): n is a, c, g, or t
  misc_feature (1019)..(1019): n is a, c, g, or t
  misc_feature (1026)..(1027): n is a, c, g, or t
  misc_feature (1036)..(1036): n is a, c, g, or t
  misc_feature (1038)..(1038): n is a, c, g, or t
  misc_feature (1051)..(1052): n is a, c, g, or t
  misc_feature (1057)..(1057): n is a, c, g, or t
  misc_feature (1067)..(1067): n is a, c, g, or t
  misc_feature (1069)..(1069): n is a, c, g, or t
  misc_feature (1080)..(1080): n is a, c, g, or t
  misc_feature (1084)..(1084): n is a, c, g, or t
  misc_feature (1093)..(1093): n is a, c, g, or t
  misc_feature (1100)..(1100): n is a, c, g, or t
  misc_feature (1110)..(1111): n is a, c, g, or t
  misc_feature (1124)..(1124): n is a, c, g, or t
  misc_feature (1129)..(1129): n is a, c, g, or t
  misc_feature (1134)..(1134): n is a, c, g, or t
  misc_feature (1162)..(1162): n is a, c, g, or t
  misc_feature (1165)..(1165): n is a, c, g, or t
  misc_feature (1167)..(1168): n is a, c, g, or t
  misc_feature (1170)..(1170): n is a, c, g, or t
  misc_feature (1173)..(1175): n is a, c, g, or t
  misc_feature (1177)..(1177): n is a, c, g, or t
  misc_feature (1180)..(1180): n is a, c, g, or t
naaatagagaaattactatgagaggatcgcatcaccatcaccatcacggatcctatttaggtgacactatagaatcgtcgacccacgcgtccgcccacgcgtccgccagaactgaggcttggctggactgtcccccgactccagtgctgcctgaggggcgccggagccactcggcctttggctacaatggggagctgtacatctttggtggttataatgcaaggctgaaccggcacttccatgacctctggaagtttaatcctgtgtcctttacctggaaaaagattgaaccgaaggggaaggggccatgtccccgccggcgccagtgctgctgtattgttggtgacaagattgtcctctttgggggtaccagtccatcncctgaggaaggcctgggagatgaatttgaccttatagatcattctgacttacacattttggactttagccctagtctgaagactctgtgcaaactggccgtgattcagtataacctagaccagtcctgtttgcctcatgatatcaggtgggagctgaatgccatgaccaccaacagcaatatcagtcgccccatcgtctcctcccatgggtaggaggaagtttctgccacctcccctcctgagcctgctgtcatcttcactgcccctgcccatctgtcacccacctgctcctttgacccctggacttggtatacctccatgtggagttgttgggcgagaggtgttctctgtgctgtgaaattcagtggggagctgtancggggtgggggctaggttcctccccccttgggccgaaggccccnttcccccttggtgctctgtccccatccacctccctttcanctgctcctgggcctcagctctgcccangggccagccagtttctgctgggaanggaaagggaatgggggaaaaaggaaaancaagcanttgtctgaacctcangancttccccctcccccttttgcctatcccctcccctcngcttgaaccttgaaccttgactgggaacntnaaagnaattgcnncttgttggnangaaaactccttcnnccccntcttggggangnggggaaccaanaaanaaattcccncccttcnttgagctgtnnctgtactctgaantttcnccccnctcaaaatttttaaaaaataatttaaanccncnnanaannnanaana

SEQ ID NO: 462 - DNA, 922 bp, Homo Sapiens
gaggatcgcatcaccatcaccatcacggatcctatttaggtgacactatagaatcgtcgacccacgcgtccgggctcgcggacggtggccgacaggctgcgcccgcccgcgcccggggtgatgcagttgccccccgcgctgtgcgcccgcctcgctgcggggcccggggcggcggagccgctgcctgtagagcgggatcccgcggctggggccgcgccctttcgcttcgttgcgcgccccgtgcgcttcccgcgggagcaccagttcttcgaggatggggacgtgcagcgccacctctacctccaggacgtgatcatgcaggtggccgacgtgcctgagaagcccagggtgcccgcgtttgcctgccaggtggccggctgctgccaggtgttcgatgccctggacgactacgagcaccactaccacacgctgcacggaaatgtttgctccttttgcaagcgggccttcccttccggacacctgctggacgcccacatcctggagtggcacgattcgctcttccagatcctgtctgagaggcaggacatgtatcagtgcttggtagaaggctgcacagagaagttcaagaccagcagagaccggaaggatcacatggtgaggatgcacctgtaccccgcggacttccggtttgataagccaaagaaaagcagaagcccagcctcagcagaagccccaggggacagtggagagcggtcagaaggggaggccatggaaatctgctctgagcctgtggcagcctcccctgcaccggcaggtgagaggcggatctacagacatagaataccctctaccatctgctttggtcagggtgccgctcgaggatttaaaagcaacaagaagaaaaccaaacaatgctgatagactcagaaaaggagtggggggcagtcaccactgctgggcg

SEQ ID NO: 463 - DNA, 1256 bp, Homo Sapiens
  misc_feature (1)..(1): n is a, c, g, or t
  misc_feature (866)..(866): n is a, c, g, or t
  misc_feature (927)..(927): n is a, c, g, or t
  misc_feature (929)..(929): n is a, c, g, or t
  misc_feature (976)..(976): n is a, c, g, or t
  misc_feature (989)..(989): n is a, c, g, or t
  misc_feature (1004)..(1004): n is a, c, g, or t
  misc_feature (1007)..(1007): n is a, c, g, or t
  misc_feature (1010)..(1010): n is a, c, g, or t
  misc_feature (1017)..(1017): n is a, c, g, or t
  misc_feature (1021)..(1021): n is a, c, g, or t
  misc_feature (1036)..(1036): n is a, c, g, or t
  misc_feature (1038)..(1038): n is a, c, g, or t
  misc_feature (1051)..(1051): n is a, c, g, or t
  misc_feature (1059)..(1059): n is a, c, g, or t
  misc_feature (1061)..(1061): n is a, c, g, or t
  misc_feature (1065)..(1065): n is a, c, g, or t
  misc_feature (1076)..(1076): n is a, c, g, or t
  misc_feature (1086)..(1086): n is a, c, g, or t
  misc_feature (1091)..(1091): n is a, c, g, or t
  misc_feature (1098)..(1098): n is a, c, g, or t
  misc_feature (1101)..(1101): n is a, c, g, or t
  misc_feature (1112)..(1112): n is a, c, g, or t
  misc_feature (1114)..(1114): n is a, c, g, or t
  misc_feature (1122)..(1123): n is a, c, g, or t
  misc_feature (1131)..(1131): n is a, c, g, or t
  misc_feature (1136)..(1138): n is a, c, g, or t
  misc_feature (1155)..(1155): n is a, c, g, or t
  misc_feature (1160)..(1161): n is a, c, g, or t
  misc_feature (1168)..(1168): n is a, c, g, or t
  misc_feature (1173)..(1173): n is a, c, g, or t
  misc_feature (1178)..(1178): n is a, c, g, or t
  misc_feature (1196)..(1196): n is a, c, g, or t
  misc_feature (1204)..(1204): n is a, c, g, or t
  misc_feature (1227)..(1227): n is a, c, g, or t
  misc_feature (1229)..(1229): n is a, c, g, or t
  misc_feature (1233)..(1233): n is a, c, g, or t
  misc_feature (1236)..(1237): n is a, c, g, or t
naatagagaaattactatgagaggatcgcatcaccatcaccatcacggatcctatttaggtgacactatagaatcgtcgacccacgcgtccggcttccatgtaggaagcggctgtaccgatcctgagaccttcgtgcaggcaatctctgatgcccgctgtgtttttgacatgggggctgaggttggtttcagcatgtatctgcttgatattggcggtggctttcctggatctgaggatgtgaaacttaaatttgaagagatcaccggcgtaatcaacccagcgttggacaaatactttccgtcagactctggagtgagaatcatagctgagcccggcagatactatgttgcatcagctttcacgcttgcagttaatatcattgccaagaaaattgtattaaaggaacagacgggctctgatgacgaagatgagtcgagtgagcagacctttatgtattatgtgaatgatggcgtctatggatcatttaattgcatactctatgaccacgcacatgtaaagccccttctgcaaaagagacctaaaccagatgagaagtattattcatccagcatatggggaccaacatgtgatggcctcgatcggattgttgagcgctgtgacctgcctgaaatgcatgtgggtgattggatgctctttgaaaacatgggcgcttacactgttgctgctgcctctacgttcaatggcttccagaggccgacgatctactatgtgatgtcagggcctgcgtggcaactcatgcagcaattccagaaccccgacttcccacccgaagtagaggaacaggatgccagcaccctgcctgtgtcttgtgcctgggagagtgggatgaaacgccacagagcancctgtgcttcggctagtattaatgtgtagatagcactctggtagctgttaactgcaagttnancttgaattaagggatttggggggaccatgtaacttaattactgctanttttgaaatgtcnttgtaaaaataaggnccnccntgatgcnaccntatggaaaactaagnanatggggtcccacnttatctgngnttcnaatggaaaccnatttgaaaantttgntttaaanggnatttttattcncnccttcaanncccctacncaaannngcccccccctgccgaanaaacnntttttancttgnaaaanggcaaaagggcccaaaancttaaggntgggaccggtttttaaaaaaaanantctnggnnttttttaaaaaaaaaaaaa

SEQ ID NO: 464 - DNA, 552 bp, Homo Sapiens
  misc_feature (1)..(1): n is a, c, g, or t
  misc_feature (552)..(552): n is a, c, g, or t
naaattagagaaattactatgagaggatcgcatcaccatcaccatcacggatcctatttaggtgacactatagaatcgtcgacccacgcgtccgcccacgcgtccgccctgtcgccaccgaggtcgcacgcgtgagacttctccgccgcagacgccgccgcgatgcgctacgtcgcctcctacctgctggctgccctagggggcaactcctcccccagcgccaaggacatcaagaagatcttggacagcgtgggtatcgaggcggacgacgaccggctcaacaaggttatcagtgagctgaatggaaaaaacattgaagacgtcattgcccagggtattggcaagcttgccagtgtacctgctggtggggctgtagccgtctctgctgccccaggctctgcagcccctgctgctggttctgcccctgctgcagcagaggagaagaaagatgagaagaaggaggagtctgaagagtcagatgatgacatgggatttggcctttttgattaaattcctgctcccctgcaaataaagcctttttacacatctaan

SEQ ID NO: 465 - DNA, 1179 bp, Homo Sapiens
  misc_feature (1)..(2): n is a, c, g, or t
  misc_feature (4)..(4): n is a, c, g, or t
  misc_feature (911)..(911): n is a, c, g, or t
  misc_feature (921)..(921): n is a, c, g, or t
  misc_feature (933)..(933): n is a, c, g, or t
  misc_feature (970)..(970): n is a, c, g, or t
  misc_feature (972)..(972): n is a, c, g, or t
  misc_feature (979)..(979): n is a, c, g, or t
  misc_feature (981)..(981): n is a, c, g, or t
  misc_feature (984)..(984): n is a, c, g, or t
  misc_feature (994)..(994): n is a, c, g, or t
  misc_feature (1005)..(1005): n is a, c, g, or t
  misc_feature (1015)..(1016): n is a, c, g, or t
  misc_feature (1022)..(1022): n is a, c, g, or t
  misc_feature (1055)..(1055): n is a, c, g, or t
  misc_feature (1057)..(1058): n is a, c, g, or t
  misc_feature (1063)..(1064): n is a, c, g, or t
  misc_feature (1069)..(1069): n is a, c, g, or t
  misc_feature (1072)..(1072): n is a, c, g, or t
  misc_feature (1078)..(1078): n is a, c, g, or t
  misc_feature (1089)..(1089): n is a, c, g, or t
  misc_feature (1091)..(1091): n is a, c, g, or t
  misc_feature (1094)..(1094): n is a, c, g, or t
  misc_feature (1116)..(1116): n is a, c, g, or t
  misc_feature (1118)..(1118): n is a, c, g, or t
  misc_feature (1120)..(1120): n is a, c, g, or t
  misc_feature (1129)..(1129): n is a, c, g, or t
  misc_feature (1136)..(1136): n is a, c, g, or t
  misc_feature (1139)..(1139): n is a, c, g, or t
  misc_feature (1141)..(1141): n is a, c, g, or t
  misc_feature (1143)..(1143): n is a, c, g, or t
  misc_feature (1150)..(1150): n is a, c, g, or t
  misc_feature (1173)..(1173): n is a, c, g, or t
  misc_feature (1175)..(1175): n is a, c, g, or t
nnantagagaaattactatgagaggatcgcatcaccatcaccatcacggatcctatttaggtgacactatagaatcgtcgacccacgcgtccgcggacgcgtgggccaaaattaagggtaaaagtgggagattcttcacagtcaagctcccagttgctcttgatcctggggccaagatttcagtcattgtggaaacagtctacacccatgtgcttcatccgtatccaacccagatcacccagtcagagaaacagtttgtggtgtttgaggggaaccattatttctactctccctatccaacgaagacacaaaccatgcgtgtgaagcttgcctctcgaaatgtggagagctacaccaagctggggaaccccacgcgctctgaggacctactggattatgggcctttcagagatgtgcctgcctatagtcaggatacttttaaagtacattatgagaacaacagccctttcctgaccatcaccagcatgacccgagtcattgaagtctctcactggggtaatattgctgtggaagaaaatgtggacttaaagcacacaggagctgtgcttaaggggcctttctcacgctatgattaccagagacagccagatagtggaatatcctccatccgttcttttaagaccatccttcctgctgctgcccaggatgtttattaccgggatgagattggcaatgtttctaccagccacctccttattttggatgactctgtagagatggaaatccggcctcgcttccctctctttggcgggtggaagacccattacatcgttggctacaacctcccaagctatgagtacctctataatttgggtgaccagtatgcactgaagatgaggtttgtggaccatgtgtttgatgaacaagtgatagattctctgactgtgaanatcatcctgnctgaaggagccnagaacattgaaattgatagtccctatgaaatcagccngngccccananganctgcactacncctatctgganacatttggcnnccctgngattgttgcctacaaaaaaaatctggtaaaaancnnattcnngaaantgnggtccnctaaacgttcnanaangggctcatgctgcagaaacccngncnggggggggnggccttnaanancnggttttncccgttaacatctaggtccgggngnattc

SEQ ID NO: 466 - DNA, 1211 bp, Homo Sapiens
  misc_feature (12)..(12): n is a, c, g, or t
  misc_feature (680)..(680): n is a, c, g, or t
  misc_feature (816)..(816): n is a, c, g, or t
  misc_feature (835)..(835): n is a, c, g, or t
  misc_feature (843)..(843): n is a, c, g, or t
  misc_feature (845)..(846): n is a, c, g, or t
  misc_feature (865)..(865): n is a, c, g, or t
  misc_feature (876)..(876): n is a, c, g, or t
  misc_feature (879)..(879): n is a, c, g, or t
  misc_feature (890)..(890): n is a, c, g, or t
  misc_feature (896)..(896): n is a, c, g, or t
  misc_feature (929)..(929): n is a, c, g, or t
  misc_feature (935)..(935): n is a, c, g, or t
  misc_feature (945)..(945): n is a, c, g, or t
  misc_feature (947)..(947): n is a, c, g, or t
  misc_feature (965)..(965): n is a, c, g, or t
  misc_feature (967)..(967): n is a, c, g, or t
  misc_feature (975)..(975): n is a, c, g, or t
  misc_feature (978)..(978): n is a, c, g, or t
  misc_feature (985)..(985): n is a, c, g, or t
  misc_feature (990)..(990): n is a, c, g, or t
  misc_feature (999)..(999): n is a, c, g, or t
  misc_feature (1030)..(1030): n is a, c, g, or t
  misc_feature (1038)..(1038): n is a, c, g, or t
  misc_feature (1042)..(1042): n is a, c, g, or t
  misc_feature (1045)..(1045): n is a, c, g, or t
  misc_feature (1047)..(1049): n is a, c, g, or t
  misc_feature (1064)..(1064): n is a, c, g, or t
  misc_feature (1076)..(1077): n is a, c, g, or t
  misc_feature (1088)..(1090): n is a, c, g, or t
  misc_feature (1097)..(1097): n is a, c, g, or t
  misc_feature (1103)..(1103): n is a, c, g, or t
  misc_feature (1105)..(1105): n is a, c, g, or t
  misc_feature (1112)..(1112): n is a, c, g, or t
  misc_feature (1117)..(1117): n is a, c, g, or t
  misc_feature (1122)..(1122): n is a, c, g, or t
  misc_feature (1128)..(1128): n is a, c, g, or t
  misc_feature (1142)..(1142): n is a, c, g, or t
  misc_feature (1144)..(1144): n is a, c, g, or t
  misc_feature (1148)..(1148): n is a, c, g, or t
  misc_feature (1154)..(1154): n is a, c, g, or t
  misc_feature (1156)..(1156): n is a, c, g, or t
  misc_feature (1169)..(1169): n is a, c, g, or t
  misc_feature (1176)..(1176): n is a, c, g, or t
  misc_feature (1183)..(1183): n is a, c, g, or t
  misc_feature (1189)..(1189): n is a, c, g, or t
  misc_feature (1195)..(1195): n is a, c, g, or t
  misc_feature (1200)..(1200): n is a, c, g, or t
tagagaaattanctatgagaggatcgcatcaccatcaccatcacggatcctatttaggtgacactatagaatcgtcgacccacgcgtccgaaaaacatgaagactttgacaaagcgattaacgtccaggaagagaagattgctgctctgcaggcctttgccgaccagctcatcgctgccggccattatgccaagggagacatttctagccggcgcaatgaggtcttggacaggtggcgacgtctgaaagcccagatgattgagaaaaggtcaaagctaggagaatctcaaaccctccaacagttcagccgggatgtggatgagattgaggcttggatcagtgaaaaattgcaaacagcgagtgatgagtcgtacaaggatcccaccaacatccagctttccaagctgctgagcaagcaccagaagcaccaggcttttgaagcagagctgcatgccaacgctgaccggatccgtggggttatcgacatgggcaactccctcattgaacgtggagcctgtgccggcagtgaggatgctgtcaaggcccgcctggctgccttagctgaccagtggcagttcttggtgcaaaagtcagcggaaaagagccagaaactgaaagaagccaacaagcagcagaacttcaacacagggatcaaggactttgacttctggctgtctgangtggaggccctgctggcatccgaagattatggcaaagacctggcttctgtgaacaacctgctgaaaaagcatcaactgctggaagcagatatatctgcccatgaggatcgcctgaaggacctgaacagccaggcanacagcctgatgaccagcantgccttcnanncctcccaagtaaggacaanagggaacaccntcnaccggggcgcntcccanaaaatcaaaaacatggggggcctccccggcganccaaanctgaatgaantncccatcccccctgcaccnanttctttcnggnaaatggnatganaaaggaatncctggaatcaaggaaaaaaaaacctgcctgnggggctcnaaanaantnnnggcccgggaaccttnacccggggtggnnaaaaccttggnnnaaaaacnccaaancnggtttgnaaacnaaaantgggtngcccataaacccgncntttncagggntnccggaaaactggnaaaaaanctttccnaaaaancccccntcggnaaaaaaaaatt

SEQ ID NO: 467 - DNA, 851 bp, Homo Sapiens
  misc_feature (2)..(2): n is a, c, g, or t
  misc_feature (7)..(12): n is a, c, g, or t
  misc_feature (14)..(14): n is a, c, g, or t
  misc_feature (632)..(632): n is a, c, g, or t
  misc_feature (740)..(740): n is a, c, g, or t
  misc_feature (749)..(749): n is a, c, g, or t
  misc_feature (755)..(755): n is a, c, g, or t
  misc_feature (783)..(783): n is a, c, g, or t
  misc_feature (792)..(792): n is a, c, g, or t
  misc_feature (812)..(812): n is a, c, g, or t
  misc_feature (815)..(815): n is a, c, g, or t
  misc_feature (820)..(821): n is a, c, g, or t
  misc_feature (826)..(826): n is a, c, g, or t
  misc_feature (828)..(829): n is a, c, g, or t
  misc_feature (836)..(836): n is a, c, g, or t
  misc_feature (848)..(848): n is a, c, g, or t
cnacccnnnnnnantagagaaattactatgagaggatcgcatcaccatcaccatcacggatcctatttaggtgacactatagaatcgtcgacccacgcgtccgcccacgcgtccgctaggttttcggaagggaggatcagggatgtttgcgagcggctggaaccagacggtgccgatagaggaagcgggctccatggctgccctcctgctgctgcccctgctgctgttgctaccgctgctgctgctgaagctacacctctggccgcagttgcgctggcttccggcggacttggcctttgcggtgcgagctctgtgctgcaaaagggctcttcgagctcgcgccctggccgcggctgccgccgacccggaaggtcccgaggggggctgcagcctggcctggcgcctcgcggaactggcccagcagcgcgccgcgcacacctttctcattcacggctcgcggcgctttagctactcagaggcggagcgcgagagtaacagggctgcacgcgccttcctacgtgcgctaggctgggactggggacccgacggcggcgacagcggcgaggggagcgctggagaaggcgagcgggcagcgccgggagccggagatgcagcggccggaagcggcgcgnagtttgccggaggggacggtgccgccagaggtggaggagccgccgcccctctgtcacctggagcaactgtggcgctgctcctccccgctggcccaaagtttctgtggntctggttcnggctgnccaaagccggcctgcgcactgcctttgngcccaccgncctgcgccggggccccctgntgnactgnntccgnanntgcagancgcgcaccctgntct

SEQ ID NO: 468 - DNA, 928 bp, Homo Sapiens
  misc_feature (748)..(748): n is a, c, g, or t
  misc_feature (755)..(755): n is a, c, g, or t
  misc_feature (757)..(757): n is a, c, g, or t
  misc_feature (759)..(759): n is a, c, g, or t
  misc_feature (761)..(784): n is a, c, g, or t
  misc_feature (817)..(817): n is a, c, g, or t
  misc_feature (826)..(826): n is a, c, g, or t
  misc_feature (831)..(831): n is a, c, g, or t
  misc_feature (901)..(901): n is a, c, g, or t
  misc_feature (905)..(905): n is a, c, g, or t
aattagagaaattactatgagaggatcgcatcaccatcaccatcacggatcctatttaggtgacactatagaatcgtcgacccacgcgtccgcgtccacactcgccgcgcgcgcggcggccgggctggaccttgctggcccgcggcgccatgagccgcagcctggactcggcgcggagcttcctggagcggctggaagcgcggggcggccgggagggggcagtcctcgccggcgagttcagcaaaaggtgtgagcggtactgggcccaggagcaggagccactgcagactgggcttttctgcatcactctgataaaggagaagtggctgaatgaggacatcatgctcaggaccctcaaggtcacattccagaaggagtcccgttctgtgtaccagctacagtatatgtcctggccagaccgtggggtccccagcagtcctgaccacatgctcgccatggtggaggaagcccgtcgcctccagggatctggccctgaacccctctgtgtccactgcaggttttggaaatgggcttcaggagggtctggtgaggcagaggggacagagcatggaggggagtacagggcatggggctagtcttgtagtctgagtgcctattttgagaacccttgctcaccctccatggactgtaattgtgagcacttgttcagcacagactcagctggggaataagcacacagctcttgctcaacaaaatgtaagtgattaaaaaggttttccttgttcanatataanananannnnnnnnnnnnnnnnnnnnnnnngggcggccgctccctatagtgagtcgtattaancttaattanctgancttggactcctgttgataaatccagtaatgacctcaaaactccatctggatttgttcaaaacgctcggtngccnccgggcgttttttattggtgaaa

SEQ ID NO: 469 - DNA, 1181 bp, Homo Sapiens
  misc_feature (3)..(4): n is a, c, g, or t
  misc_feature (894)..(894): n is a, c, g, or t
  misc_feature (918)..(918): n is a, c, g, or t
  misc_feature (921)..(921): n is a, c, g, or t
  misc_feature (964)..(964): n is a, c, g, or t
  misc_feature (974)..(974): n is a, c, g, or t
  misc_feature (979)..(979): n is a, c, g, or t
  misc_feature (985)..(985): n is a, c, g, or t
  misc_feature (992)..(992): n is a, c, g, or t
  misc_feature (1016)..(1016): n is a, c, g, or t
  misc_feature (1024)..(1024): n is a, c, g, or t
  misc_feature (1027)..(1027): n is a, c, g, or t
  misc_feature (1030)..(1030): n is a, c, g, or t
  misc_feature (1054)..(1054): n is a, c, g, or t
  misc_feature (1063)..(1063): n is a, c, g, or t
  misc_feature (1084)..(1084): n is a, c, g, or t
  misc_feature (1087)..(1088): n is a, c, g, or t
  misc_feature (1096)..(1096): n is a, c, g, or t
  misc_feature (1123)..(1123): n is a, c, g, or t
  misc_feature (1144)..(1144): n is a, c, g, or t
  misc_feature (1150)..(1151): n is a, c, g, or t
  misc_feature (1154)..(1154): n is a, c, g, or t
  misc_feature (1157)..(1157): n is a, c, g, or t
  misc_feature (1167)..(1167): n is a, c, g, or t
  misc_feature (1176)..(1176): n is a, c, g, or t
  misc_feature (1179)..(1179): n is a, c, g, or t
  misc_feature (1181)..(1181): n is a, c, g, or t
cannagagagattactatgagaggatcgcatcaccatcaccatcacggatcctatttaggtgacactatagaatcgtcgacccacgcgtccgcccacgcgtccggcacctggcgcccagcgcgcccgtggccgctgccgcctccgccccaggttttgcgtgtgaagctgtgtggaaatgtgaaatactaccagtcacaccattatagtaccgtggtgccacctgatgaaataacagttaattatagacatggccttcccttggtaacacttaccttgccatctagaaaagaacgttgtcaattcgtagtcaaaccaatgttgtcaacagttggttcattccttcaggacctacaaaatgaagataagggtatcaaaactgcagccatcttcacagcagatggcaacatgatttcagcttctaccttgatggatattttgctaatgaatgattttaaacttgtcattaataaaatagcatatgatgtgcagtgtccaaagagagaaaaaccaagtaatgagcacactgctgagatggaacacatgaaatctttggttcacagactatttacaatcttgcatttagaagagtctcagaaaaagagagagcaccatttactggagaaaattgaccacctgaaggaacagctgcagccccttgaacaggtgaaagctggaatagaagctcattcggaagccaaaaccagtggactcctgtgggctggattggcactgctgtccattcagggtggggcactggcctggctcacgtggtgggtgtactcctgggatatcatggagccagttacatacttcatcacatttgcaaattctatggtcttttttgcatactttatagtcactcgacaggattatacttactcagctgttaaaantaggcaatttcttcagttcttccncanaaatcaaagcaacagcactttgatgtgcaccaatacaacaagnttaaaaaaanacctngctaangctaaanaatccctgaaacaggcgcgtcatnctctctgnttngcnaatgcaagtaaaaaaactccatgnaaaaaaatnatcttacagttttaaaggccnccnnaatttccnttaaggattgatttgccaactaaggangtttttgaaccccagggtcantttganngtnaanccttggtaanaattctggnaancn

SEQ ID NO: 470 - DNA, 1179 bp, Homo Sapiens
  misc_feature (796)..(796): n is a, c, g, or t
  misc_feature (829)..(829): n is a, c, g, or t
  misc_feature (901)..(901): n is a, c, g, or t
  misc_feature (951)..(951): n is a, c, g, or t
  misc_feature (955)..(955): n is a, c, g, or t
  misc_feature (957)..(957): n is a, c, g, or t
  misc_feature (1006)..(1006): n is a, c, g, or t
  misc_feature (1008)..(1008): n is a, c, g, or t
  misc_feature (1011)..(1012): n is a, c, g, or t
  misc_feature (1029)..(1029): n is a, c, g, or t
  misc_feature (1049)..(1049): n is a, c, g, or t
  misc_feature (1055)..(1055): n is a, c, g, or t
  misc_feature (1064)..(1064): n is a, c, g, or t
  misc_feature (1080)..(1080): n is a, c, g, or t
  misc_feature (1082)..(1082): n is a, c, g, or t
  misc_feature (1094)..(1094): n is a, c, g, or t
  misc_feature (1100)..(1100): n is a, c, g, or t
  misc_feature (1103)..(1103): n is a, c, g, or t
  misc_feature (1107)..(1108): n is a, c, g, or t
  misc_feature (1121)..(1122): n is a, c, g, or t
  misc_feature (1134)..(1134): n is a, c, g, or t
  misc_feature (1146)..(1146): n is a, c, g, or t
  misc_feature (1153)..(1153): n is a, c, g, or t
  misc_feature (1159)..(1159): n is a, c, g, or t
  misc_feature (1162)..(1162): n is a, c, g, or t
  misc_feature (1173)..(1173): n is a, c, g, or t
agaaattaactatgagaggatcgcatcaccatcaccatcacggatcctatttaggtgacactatagaatcgtcgacccacgcgtccgcccacgcgtccggcggcggaaatcgcgcggatgccagaacgcgctctcagcttcgggtcctgcggctgcggctgccgccatcatggtgcggaagcttaagttccacgagcagaagctgctgaagcaggtggacttcctgaactgggaggtcaccgaccacaacctgcacgagctgcgcgtgctgcggcgttaccggctgcagcggcgggaggactacacgcgctacaaccagctgagccgtgccgtgcgtgagctggcgcggcgcctgcgcgacctgcccgaacgcgaccagttccgcgtgcgcgcttcggccgcgctgctggacaagctgtatgctctcggcttggtgcccacgcgcggttcgctggagctctgcgacttcgtcacggcctcgtccttctgccgccgccgcctccccaccgtgctcctcaagctgcgcatggcgcagcaccttcaggctgccgtggcctttgtggagcaagggcacgtacgcgtgggccctgacgtggttaccgaccccgccttccttgtcacgcgcagcatggaggactttgtcacttgggtggactcgtccaagatcaagcggcacgtgctagagtacaatgaggagcgcgatgacttcgatctggaagcctagcggatctcccactttgcatggctgtcttttacagatgggaaaactgaggcctgatgctggagattctatganggtgctctcctcaagggtatcagacggtcgtangttcttaagaatttgattcatcagtggcaggccatgcataaagccacgggaggtgcgtccttgttttcaagnaaatgttcttaaaacttggactactgattattaattgactgtgccttggnaaanantgggaaataacttggtgcaacactgggggtattgttggcttcttgtgtngnaanntttgtaatgtaaaaagnaaaaactggaaatccccccnccctgntttcccttnatcgtcttggggttgnantggttcaattcntttaantcnaatnnttgctcctggccnnggttaaactgtntaaaaaaaaagnaaaattnggcccnaantttttaaaaantgaacg

SEQ ID NO: 471 - DNA, 1140 bp, Homo Sapiens
  misc_feature (5)..(5): n is a, c, g, or t
  misc_feature (862)..(862): n is a, c, g, or t
  misc_feature (899)..(899): n is a, c, g, or t
  misc_feature (901)..(901): n is a, c, g, or t
  misc_feature (920)..(920): n is a, c, g, or t
  misc_feature (949)..(949): n is a, c, g, or t
  misc_feature (960)..(960): n is a, c, g, or t
  misc_feature (969)..(969): n is a, c, g, or t
  misc_feature (976)..(977): n is a, c, g, or t
  misc_feature (981)..(981): n is a, c, g, or t
  misc_feature (992)..(992): n is a, c, g, or t
  misc_feature (1004)..(1004): n is a, c, g, or t
  misc_feature (1010)..(1010): n is a, c, g, or t
  misc_feature (1014)..(1014): n is a, c, g, or t
  misc_feature (1026)..(1026): n is a, c, g, or t
  misc_feature (1030)..(1030): n is a, c, g, or t
  misc_feature (1032)..(1032): n is a, c, g, or t
  misc_feature (1040)..(1040): n is a, c, g, or t
  misc_feature (1042)..(1042): n is a, c, g, or t
  misc_feature (1045)..(1045): n is a, c, g, or t
  misc_feature (1069)..(1069): n is a, c, g, or t
  misc_feature (1077)..(1077): n is a, c, g, or t
  misc_feature (1085)..(1088): n is a, c, g, or t
  misc_feature (1095)..(1096): n is a, c, g, or t
  misc_feature (1104)..(1105): n is a, c, g, or t
  misc_feature (1116)..(1116): n is a, c, g, or t
  misc_feature (1118)..(1118): n is a, c, g, or t
  misc_feature (1125)..(1125): n is a, c, g, or t
  misc_feature (1137)..(1137): n is a, c, g, or t
cgatnagagaaattactatgagaggatcgcatcaccatcaccatcacggatcctatttaggtgacactatagaatcgtcgacccacgcgtccggtagggggtggcgctctccgttcggcggcgctcccatggcgcacattaccattaaccagtacctgcagcaggtgtacgaagccatcgacagcagagatggagcatcttgtgcagagttggtgtcttttaaacatcctcatgttgcaaacccacgacttcaagcctctccagaggagaagtgtcaacaagtcttggaacccccttatgatgaaatgtttgcagctcatttaaggtgcacttatgcagtggggaatcatgacttcatagaggcatacaagtgccagaccgtgatagtccaatcattcttgcgagcattccaggcccacaaagaagaaaactgggctctgcctgtcatgtatgcagtagcgcttgaccttcgagtgtttgccaataatgcagatcaacagttggtaaagaaaggaaaaagcaaagttggggacatgttggaaaaagcagcagagttactgatgagctgtttccgggtctgtgccagcgacacccgtgctggtatagaggactctaagaagtggggcatgctgtttctggtgaaccagctgtttaaaatctacttcaagatcaacaaactccatttatgtaaacccctaattagagcaattgacagctcaaacctgaaagacgattacagcactgcacagagagtaacatacaaatactacgttggacgcaaggctatgtttgacagcgattttaagcaagctgaggagtacctgtcattttgcctttgagcattgtccaccgttctagtcanaagaacaaaaaggatgattctgatctatttgcttccngnaaaaatgctattggggtcncatgccccctgggggagctcctgaaaaantatcccctgangcagtttgncgaaatnnccanagctttgaacnagggcaacctgntgttgntgcncaaagccctggnaaancncaaggccntnttnattccttgggaaattttcccttcngggaaaanctgaaaannnncccccanngggaaccnnttaaaaaaatntnttttttnttaaaacccccncct

SEQ ID NO: 472 - DNA, 1000 bp, Homo Sapiens
  misc_feature (654)..(654): n is a, c, g, or t
  misc_feature (656)..(656): n is a, c, g, or t
  misc_feature (683)..(683): n is a, c, g, or t
  misc_feature (710)..(710): n is a, c, g, or t
  misc_feature (719)..(719): n is a, c, g, or t
  misc_feature (756)..(756): n is a, c, g, or t
  misc_feature (762)..(762): n is a, c, g, or t
  misc_feature (792)..(792): n is a, c, g, or t
  misc_feature (806)..(806): n is a, c, g, or t
  misc_feature (821)..(821): n is a, c, g, or t
  misc_feature (826)..(826): n is a, c, g, or t
  misc_feature (829)..(829): n is a, c, g, or t
  misc_feature (831)..(831): n is a, c, g, or t
  misc_feature (839)..(839): n is a, c, g, or t
  misc_feature (844)..(844): n is a, c, g, or t
  misc_feature (846)..(846): n is a, c, g, or t
  misc_feature (852)..(852): n is a, c, g, or t
  misc_feature (855)..(855): n is a, c, g, or t
  misc_feature (858)..(859): n is a, c, g, or t
  misc_feature (863)..(863): n is a, c, g, or t
  misc_feature (870)..(870): n is a, c, g, or t
  misc_feature (874)..(874): n is a, c, g, or t
  misc_feature (880)..(881): n is a, c, g, or t
  misc_feature (883)..(883): n is a, c, g, or t
  misc_feature (905)..(905): n is a, c, g, or t
  misc_feature (908)..(908): n is a, c, g, or t
  misc_feature (918)..(918): n is a, c, g, or t
  misc_feature (921)..(921): n is a, c, g, or t
  misc_feature (938)..(938): n is a, c, g, or t
  misc_feature (943)..(943): n is a, c, g, or t
  misc_feature (952)..(952): n is a, c, g, or t
  misc_feature (957)..(957): n is a, c, g, or t
  misc_feature (975)..(975): n is a, c, g, or t
  misc_feature (981)..(981): n is a, c, g, or t
  misc_feature (985)..(985): n is a, c, g, or t
cgattagagaaattactatggagaggatcgcatcaccatcaccatcacggatcctatttaggtgacactatagaatcgtcgacccacgcgtccgcggacgcgtgggcggacgcgtgggctcagacatctctgtgtctcctttggaatcaggctgctgcaagctggttgtctgacagtcagttttgcaaagtggttgaggaaactgcagactatgtggaatgtgcctgttcacacatgtctgtgtatgctgtctatgctcggactgacaacttgtcttcatacaatgaagccttcttcacttctggatttatatgtatctcaggtctttgcttggctgttctttcccatatcttctgtgccaggtactccatgtttgcagctaaacttctgactcacatgatggcagccagcttaggtacacagattctgtttctggcgtctgcatacgcaagtccccaactcgctgaggagagctgttcagctatggctgctgtcacacattacctgtatctttgccagtttagctggatgctcattcagtctgtgaatttctggtacgtgctggtgatgaatgatgagcacacagagaggcgatatctgctgtttttccttctgagttggggactacccagcttttgtggtgattctcctcananttattttgaaaaggaatctatcatcanagcatgtcacaagatctatgggactcnattcatggntgacctgttgttttattccaaaacgtcctatgctgcnttgttnactgccaacttccttggttccctttgaacnttgcccccgtgggnggtggttccgtgggngttcnatncnatgccccnaccangnggaaanccnccnntggnaaaagcnaaanaatganntncttcaaaagaaaggaaaaaatnccngccaaaaaanttncccccgaaatttaaaanccccnttgcccctnaattnccgcgaaaaagggctttngggggnaaancaaaacaatgggccc

SEQ ID NO: 473 - DNA, 807 bp, Homo Sapiens
catcaccatcaccatcacggatcctatttaggtgacactatagaatcgtcgacccacgcgtccgcgcagcagtcagggtcactgtgggagccctggggtggagtgacaaaccgcattgtcctgtgcccgccatggcagaagcgcagcctttgtatggaggcccaaccgcgctcccgtctggagaagcggcttccggggtgtggctgccgggtcggctctggtccacagcacggtgccggggctgcaggttgttgagggctgtgactccgtggggctcagccaggctccagcagggtcagacgtgctgttaagagcaaagccacagacgatgacttgtccattctcagtggatgctccaggctgtgcctacacagcagtgctggtgacatgtccagggttccagggcccggtggcctgggagctgctttctccccactggctgggctgcatctggccctggctggaggccttgctttgaggggctgtgaccctcttcccccaggccctccccagccgacgacagccaccggagaggagatcggaacacgattgtctcagatgcagggcgctgtgcgggacgaagccgcaaggactctcgtatcgggcccttgggactcgggaggtgccagaggcggcggctgctctggacctcggtgttcactgacctttgttttacttgcctctgctcgactccgagagcaggaaacccggccgtggcctggcagctccgcctcccatgcccgcacgctggggtctgtcttgtctggagcagtggggcacaccccggaggaggcgggggtcagggct

SEQ ID NO: 474 - DNA, 1173 bp, Homo Sapiens
  misc_feature (785)..(785): n is a, c, g, or t
  misc_feature (813)..(813): n is a, c, g, or t
  misc_feature (815)..(815): n is a, c, g, or t
  misc_feature (892)..(892): n is a, c, g, or t
  misc_feature (908)..(908): n is a, c, g, or t
  misc_feature (922)..(922): n is a, c, g, or t
  misc_feature (930)..(930): n is a, c, g, or t
  misc_feature (942)..(942): n is a, c, g, or t
  misc_feature (971)..(971): n is a, c, g, or t
  misc_feature (996)..(996): n is a, c, g, or t
  misc_feature (1008)..(1008): n is a, c, g, or t
  misc_feature (1023)..(1023): n is a, c, g, or t
  misc_feature (1026)..(1026): n is a, c, g, or t
  misc_feature (1029)..(1029): n is a, c, g, or t
  misc_feature (1032)..(1032): n is a, c, g, or t
  misc_feature (1038)..(1039): n is a, c, g, or t
  misc_feature (1045)..(1046): n is a, c, g, or t
  misc_feature (1058)..(1059): n is a, c, g, or t
  misc_feature (1066)..(1066): n is a, c, g, or t
  misc_feature (1074)..(1074): n is a, c, g, or t
  misc_feature (1079)..(1079): n is a, c, g, or t
  misc_feature (1082)..(1082): n is a, c, g, or t
  misc_feature (1094)..(1094): n is a, c, g, or t
  misc_feature (1103)..(1103): n is a, c, g, or t
  misc_feature (1115)..(1115): n is a, c, g, or t
  misc_feature (1122)..(1122): n is a, c, g, or t
  misc_feature (1132)..(1133): n is a, c, g, or t
  misc_feature (1144)..(1144): n is a, c, g, or t
  misc_feature (1155)..(1155): n is a, c, g, or t
  misc_feature (1158)..(1158): n is a, c, g, or t
  misc_feature (1166)..(1173): n is a, c, g, or t
gagaaattactatgagaggatcgcatcaccatcaccatcacggatcctatttaggtgacactatagaatcgtcgacccacgcgtccgctgcttcatcatcatcctcctcagctggtggggtcagtggaagttctgtcactggatctggtttcagtgtctcagaccttgccccaccacggaaagcccttttcacctaccccaaaggagctggagagatgttagaagatggctctgagagattcctctgcgaatctgtttttagctatcaagtggcatccacgcttaaacaggtgaaacatgatcagcaagttgctcggatggaaaaactagctggtttggtagaagagctggaggctgacgagtggcggtttaagcccatcgagcagctgctgggattcaccccctcttcaggttgatactgcctggatggtcacctctggtgcgcagcaagtgcaaagccagtgggggactttctcacagcttacatagccatccagagatccacagctacgtcactgaattgttaatgcacatttgtacttggtttctctgtatctattcacaggcaacaaatacttatatgtgtgatctttcagggaatgttttgtttatttgtttttaaaagtattgggaatcagattaagacaatcagtttcagagaaccaggaggtttggggttaagagatactcaaaaattttcacaagccaagtagggcatatatcagatttggccaactgaatggcgtctgtcctgtcatccatatggtgcctggaaatatttaccnagtcaaggtcaaggtcagcatctgtggntnaaaaatatagcattctgacctaaaaaagttattttgcagatgaatgtgttttcaactcaggacctatccaaatgagnaatttttaaaaattcnttttttttttcccnatttttanacatcaattctnaaaaattctgaacttttttctaaacctcntaaaaaacatgcccaaaatgctggncaaaaaaaaaantgctttttggaaaanggncanccnctttgnnaaaaannaaaccagttaanncaaaatncctttttnaaacncanaaaatcccgganttcttcccnattgggggaacncaaccantttctgttannaaaaaaatccntttgaaaaaanccnccaaaaannnnnnnn

SEQ ID NO: 475 - DNA, 1164 bp, Homo Sapiens
  misc_feature (828)..(828): n is a, c, g, or t
  misc_feature (861)..(861): n is a, c, g, or t
  misc_feature (879)..(879): n is a, c, g, or t
  misc_feature (884)..(884): n is a, c, g, or t
  misc_feature (923)..(923): n is a, c, g, or t
  misc_feature (947)..(947): n is a, c, g, or t
  misc_feature (951)..(951): n is a, c, g, or t
  misc_feature (975)..(975): n is a, c, g, or t
  misc_feature (979)..(979): n is a, c, g, or t
  misc_feature (984)..(984): n is a, c, g, or t
  misc_feature (988)..(988): n is a, c, g, or t
  misc_feature (993)..(993): n is a, c, g, or t
  misc_feature (1000)..(1000): n is a, c, g, or t
  misc_feature (1004)..(1004): n is a, c, g, or t
  misc_feature (1035)..(1035): n is a, c, g, or t
  misc_feature (1037)..(1037): n is a, c, g, or t
  misc_feature (1053)..(1053): n is a, c, g, or t
  misc_feature (1059)..(1059): n is a, c, g, or t
  misc_feature (1071)..(1072): n is a, c, g, or t
  misc_feature (1074)..(1074): n is a, c, g, or t
  misc_feature (1076)..(1077): n is a, c, g, or t
  misc_feature (1081)..(1081): n is a, c, g, or t
  misc_feature (1085)..(1085): n is a, c, g, or t
  misc_feature (1093)..(1093): n is a, c, g, or t
  misc_feature (1096)..(1096): n is a, c, g, or t
  misc_feature (1109)..(1109): n is a, c, g, or t
  misc_feature (1128)..(1128): n is a, c, g, or t
  misc_feature (1153)..(1153): n is a, c, g, or t
  misc_feature (1164)..(1164): n is a, c, g, or t
gaatagagagaattactatgagaggatcgcatcaccatcaccatcacggatcctatttaggtgacactatagaatcgtcgacccacgcgtccgaattgaagggagagatgatggatctccaacatggcagccttttccttagaacaccaaagattgtctctggcaaagactataatgtaactgcaaactccaagctggtcattatcacggctggggcacgtcagcaagagggagaaagccgtcttaatttggtccagcgtaacgtgaacatctttaaattcatcattcctaatgttgtaaaatacagcccgaactgcaagttgcttattgtttcaaatccagtggatatcttgacctacgtggcttggaagataagtggttttcccaaaaaccgtgttattggaagcggttgcaatctggattcagcccgattccgttacctaatgggggaaaggctgggagttcacccattaagctgtcatgggtgggtccttggggaacatggagattccagtgtgcctgtatggagtggaatgaatgttgctggtgtctctctgaagactctgcacccagatttagggactgataaagataaggaacagtggaaagaggttcacaagcaggtggttgagagtgcttatgaggtgatcaaactcaaaggctacacatcctgggctattggactctctgtagcagatttggcagagagtataatgaagaatcttaggcgggtgcacccagtttccaccatgattaagggtctttacggaataaaggatgatgtcttccttagtgttccttgcattttgggacagaatggaatctcanaccttgtgaaggtgactctgacttctgaggaanaggcccgtttgaaaaaantgcanatacactttgggggatccaaaaggagctgcaattttaangtcttctgatgtcatatcatttcnctgnctaggctacaacaggattctaggnggangttgngcangttgnccttttnatcngatcggggattaaagcagtaatatttaaaangnatgggaaaacctcacncctganttaaaaaaaaanngntnntaancccngctaatcngangcggagggataanctgggaacctcacgggtangggaaaaattcgccccctgaccccnctgcaaggggn

SEQ ID NO: 476 - DNA, 1055 bp, Homo Sapiens
  misc_feature (972)..(972): n is a, c, g, or t
  misc_feature (997)..(997): n is a, c, g, or t
  misc_feature (1004)..(1004): n is a, c, g, or t
  misc_feature (1015)..(1015): n is a, c, g, or t
  misc_feature (1028)..(1028): n is a, c, g, or t
  misc_feature (1047)..(1047): n is a, c, g, or t
tagagaaattactatgagaggatcgcatcaccatcaccatcacggatcctatttaggtgacactatagaatcgtcgacccacgcgtccgcgcgggagaagaaccagcccaagccgtccccgaaacgcgagtccggagaggagttccgcatggagaagttgaaccagctgtgggagaaggcccagcgactgcatcttcctcccgtgaggctggccgagctccacgctgatctgaagatacaggagagggacgaactcgcctggaagaaactaaagcttgacggcttggacgaagatggggagaaggaagcgagactcatacgcaacctcaatgtcatcttggccaagtatggtctggacggaaagaaggacgctcggcaggtgaccagcaactccctcagtggcacccaggaagacgggctggatgaccccaggctggaaaagctgtggcacaaggcgaagacctctgggaaattctccggcgaagaactggacaagctctggcgggagttcctgcatcacaaagagaaagttcacgagtacaacgtcctgctggagaccctgagcaggaccgaagaaatccacgagaacgtcattagcccctcggacctgtccggcaggatctccagagctcggcacaacgaactctgaaggcattggggagcccagcccggcagggaagaggccagcgtgaaggacctgggctcttggccgtggcatttccgtggacagcccgccgtcagggtggctggggctggcacgggtgtcgaggcaggaaggattgtttctggtgactgcagccgctgccgtcgcgacacagggcttggtggtggtagcatttgggtctgagatcggcccagctctgactgaaggggcttggcttccactcagcatcagcgtggcagtcaccccccccagtgaggacctcgatgtccagctgctgtcaggtctgatagtccctctgctaaacaacncgatttacataaaaaatcttacacntctgccnccggaaatacnatgcacagagtcntaaaaaataaagtgcagtntttaaccc

SEQ ID NO: 477 - DNA, 1170 bp, Homo Sapiens
  misc_feature (4)..(4): n is a, c, g, or t
  misc_feature (905)..(905): n is a, c, g, or t
  misc_feature (936)..(936): n is a, c, g, or t
  misc_feature (948)..(948): n is a, c, g, or t
  misc_feature (1023)..(1023): n is a, c, g, or t
  misc_feature (1050)..(1050): n is a, c, g, or t
  misc_feature (1052)..(1052): n is a, c, g, or t
  misc_feature (1056)..(1056): n is a, c, g, or t
  misc_feature (1059)..(1059): n is a, c, g, or t
  misc_feature (1061)..(1061): n is a, c, g, or t
  misc_feature (1079)..(1079): n is a, c, g, or t
  misc_feature (1082)..(1082): n is a, c, g, or t
  misc_feature (1085)..(1085): n is a, c, g, or t
  misc_feature (1105)..(1105): n is a, c, g, or t
  misc_feature (1109)..(1109): n is a, c, g, or t
  misc_feature (1114)..(1114): n is a, c, g, or t
  misc_feature (1122)..(1122): n is a, c, g, or t
  misc_feature (1125)..(1126): n is a, c, g, or t
  misc_feature (1150)..(1151): n is a, c, g, or t
  misc_feature (1153)..(1153): n is a, c, g, or t
  misc_feature (1156)..(1156): n is a, c, g, or t
  misc_feature (1161)..(1161): n is a, c, g, or t
  misc_feature (1167)..(1167): n is a, c, g, or t
aatngagaaattactatgagaggatcgcatcaccatcaccatcacggatcctatttaggtgacactatagaatcgtcgacccacgcgtccgatccccttgagacagaatatggcctttctgtctacaaggatcaccagaccatcaccatccaggagatgccggagaaggccccagccggccagctcccccgctctgtggacgtcattctggatgatgacttggtggataaagcgaagcctggtgaccgggttcaggtggtgggaacctaccgttgccttcctggaaagaagggaggctacacctctgggaccttcaggactgtcctgattgcctgtaatgttaagcagatgagcaaggatgctcagccctctttctctgctgaggatatagccaagatcaagaagttcagtaaaacccgatccaaggatatctttgaccagctggccaagtcattggccccaagtatccatgggcatgactatgtcaagaaagcaatcctctgcttgctcttgggaggggtggaacgagacctagaaaatggcagccacatccgtggggacatcaatattcttctaataggagacccatccgttgccaagtctcagcttctgcggtatgtgctttgcactgcaccccgagctatccccaccactggccggggctcctctggagtgggtctgacggctgctgtcaccacagaccaggaaacaggagagcgccgtctggaagcaggggccatggtcctggctgaccgaggcgtggtttgcattgatgaatttgacaaaatgtctgacatggatcgcacagccatccatgaagtgatggagcagggtcgagtgaccattgccaaggctggcatccatgctcggctgaatgcccgctgcagtgttttggcagctgccanccctgtctacggcaggtatgaccagtataanactccaatgganaacattgggctacaggactcactgctgtcacgatttgacttgctcttcatcatgctggatcaaatggatcctgancaggatcgggaaatctcaaacatgtcntncgangcncnttacaaacccctggggancanganggcaagctatgccctggggnaggntgggnaatccggnccnnaagatcccacttttcccggaaatnncnggnccccnattttnaaa

SEQ ID NO: 478 - DNA, 1179 bp, Homo Sapiens
  misc_feature (913)..(913): n is a, c, g, or t
  misc_feature (925)..(925): n is a, c, g, or t
  misc_feature (940)..(940): n is a, c, g, or t
  misc_feature (954)..(954): n is a, c, g, or t
  misc_feature (1009)..(1009): n is a, c, g, or t
  misc_feature (1014)..(1014): n is a, c, g, or t
  misc_feature (1027)..(1027): n is a, c, g, or t
  misc_feature (1034)..(1034): n is a, c, g, or t
  misc_feature (1036)..(1036): n is a, c, g, or t
  misc_feature (1038)..(1038): n is a, c, g, or t
  misc_feature (1047)..(1047): n is a, c, g, or t
  misc_feature (1053)..(1053): n is a, c, g, or t
  misc_feature (1055)..(1055): n is a, c, g, or t
  misc_feature (1057)..(1057): n is a, c, g, or t
  misc_feature (1066)..(1066): n is a, c, g, or t
  misc_feature (1072)..(1072): n is a, c, g, or t
  misc_feature (1090)..(1090): n is a, c, g, or t
  misc_feature (1092)..(1092): n is a, c, g, or t
  misc_feature (1104)..(1104): n is a, c, g, or t
  misc_feature (1106)..(1106): n is a, c, g, or t
  misc_feature (1108)..(1108): n is a, c, g, or t
  misc_feature (1112)..(1113): n is a, c, g, or t
  misc_feature (1119)..(1119): n is a, c, g, or t
  misc_feature (1127)..(1127): n is a, c, g, or t
  misc_feature (1130)..(1130): n is a, c, g, or t
  misc_feature (1132)..(1133): n is a, c, g, or t
  misc_feature (1136)..(1136): n is a, c, g, or t
  misc_feature (1165)..(1165): n is a, c, g, or t
  misc_feature (1179)..(1179): n is a, c, g, or t
gagaaattactatgagaggatcgcatcaccatcaccatcacggatcctatttaggtgacactatagaatcgtcgacccacgcgtccgcccacgcgtccgcccacgcgtccgtgcatgttgatctgggcctaccttggtggggggccattgctgcatgtacagtctttgcccgctgcctgatttttcctctcatcgtgacgggccagcgagaggcagccaggatccacaatcacttgccagagatccagaagttttccagtcgaatcagagaggccaagttagcaggagaccatattgagtattacaaggcttcctcggagatggcactttaccagaaaaaacatggtattaaactctataaacctctcattctccctgtgactcaggccccaatcttcatctccttcttcattgctttgagagagatggccaaccttcctgtgcccagcctgcagacaggtggcctctggtggttccaggatctcacggtatccgatcccatctacatattaccactggcagtcactgctacaatgtgggctgttcttgagctaggtgctgagacaggtgtgcaaagttctgaccttcagtggatgagaaatgtcatcagaatgatgcccctgataaccttgcccataaccatgcatttccccacggcagtgtttatgtactggctctcctccaatttgttttccctggtccaagtatcctgtctccggattccagcagtacgcactgtacttaaaatcccccagcgtgttgtacatgacctggacaaattacctccacgggaaggcttcctagagagcttcaaaaaaggctggaaaaatgctgaaatgacgcgtcagctgcgagagcgtgaacaacgcatgcggaatcagttggaagctagcagccaggggtcctttacganagacctttaccnacaaccctctcctanaacctggaaagganaaccctcccaatatccctagcagcagcagcaaaccaaagtcaaagtatccctggnacganacacttggctganttatgtncngngggcattcnggcagnantntgttccttncaaaantcctcctcaaaaaaaaantngaactggggtcntngncccnntcctanggaatggnggncnnaanaaatgttttttttaaaaaggaattttagnaaaaccccttgtan

SEQ ID NO: 479 - DNA, 1307 bp, Homo Sapiens
  misc_feature (1)..(1): n is a, c, g, or t
  misc_feature (850)..(850): n is a, c, g, or t
  misc_feature (982)..(982): n is a, c, g, or t
  misc_feature (1016)..(1016): n is a, c, g, or t
  misc_feature (1034)..(1034): n is a, c, g, or t
  misc_feature (1040)..(1040): n is a, c, g, or t
  misc_feature (1046)..(1046): n is a, c, g, or t
  misc_feature (1050)..(1050): n is a, c, g, or t
  misc_feature (1054)..(1054): n is a, c, g, or t
  misc_feature (1062)..(1062): n is a, c, g, or t
  misc_feature (1082)..(1083): n is a, c, g, or t
  misc_feature (1085)..(1086): n is a, c, g, or t
  misc_feature (1096)..(1096): n is a, c, g, or t
  misc_feature (1098)..(1098): n is a, c, g, or t
  misc_feature (1107)..(1107): n is a, c, g, or t
  misc_feature (1116)..(1116): n is a, c, g, or t
  misc_feature (1142)..(1142): n is a, c, g, or t
  misc_feature (1155)..(1155): n is a, c, g, or t
  misc_feature (1157)..(1157): n is a, c, g, or t
  misc_feature (1162)..(1162): n is a, c, g, or t
  misc_feature (1165)..(1165): n is a, c, g, or t
  misc_feature (1171)..(1171): n is a, c, g, or t
  misc_feature (1186)..(1186): n is a, c, g, or t
  misc_feature (1190)..(1191): n is a, c, g, or t
  misc_feature (1197)..(1197): n is a, c, g, or t
  misc_feature (1211)..(1211): n is a, c, g, or t
  misc_feature (1228)..(1228): n is a, c, g, or t
  misc_feature (1246)..(1246): n is a, c, g, or t
  misc_feature (1257)..(1257): n is a, c, g, or t
  misc_feature (1272)..(1272): n is a, c, g, or t
  misc_feature (1275)..(1275): n is a, c, g, or t
  misc_feature (1278)..(1278): n is a, c, g, or t
  misc_feature (1289)..(1289): n is a, c, g, or t
naattagagaaattaactatgagaggatcgcatcaccatcaccatcacggatcctatttaggtgacactatagaatcgtcgacccacgcgtccgcctgtttccaggagcctgactacggggccctgtatgagggacgcaaccctggcttctatgtagaggcaaaccctatgccaactttcaagtgtgcagtcaaagccctctttgactacaaggcccagagggaggacgagctgaccttcatcaagagcgccatcatccagaatgtggagaagcaagagggaggctggtggcgaggggactacggagggaagaagcagctgtggttcccatcaaactacgtggaagagatggtcaaccccgtggccctggagccggagagggagcacttggacgagaacagccccctaggggacttgctgcggggggtcttggatgtgccggcttgtcagattgccatccgtcctgagggcaagaacaaccggctcttcgtcttctccatcagcatggcgtcggtggcccactggtccctggatgttgctgccgactcacaggaggagctgcaggactgggtgaaaaagatccgtgaagtggcccagacagcagacgccaggctcactgaagggaagataatggaacggaggaagaagattgccctggagctctctgaacttgtcgtctactgccggcctgttccctttgatgaagagaagattggcacagaacgtgcttgctaccgggacatgtcatccttcccggaaaccaaggctgagaaatacgtgaacaaggccaaaggcaagaagttccttcagtacaatcgactgcagctctcccgcatctaccccaagggcnagcgactggattcctccaactacgatccttttgcccatgtggatctgtgggcaagtcagcttgtggccctcaactttccaaaacccctgaacaagccctatgcaaaatgaaccagggcccttcttcatgaangggcaggcactggtggctacttgctgcagccaanccaccatgcgggaaagangccttncaaccntttngaanaaaaacancctccccggggctggaaccnngnngccctctttntngaggggctngggggcccnaaattcttccaaaaaaaaggcccaangcattttgtggtncnttttnggnaaaatnaaggggggctggganactnnaatttnaacccccccaaccnaaaaaaaaaaattttgngggggaaaaaggaacccnccctgtttggncaaccaaaacccttnccnttncaaaaaaaaanccccgaaattttcctttt

SEQ ID NO: 480 - DNA, 1053 bp, Homo Sapiens
  misc_feature (743)..(743): n is a, c, g, or t
  misc_feature (833)..(833): n is a, c, g, or t
  misc_feature (885)..(885): n is a, c, g, or t
  misc_feature (890)..(890): n is a, c, g, or t
  misc_feature (902)..(902): n is a, c, g, or t
  misc_feature (923)..(923): n is a, c, g, or t
  misc_feature (938)..(939): n is a, c, g, or t
  misc_feature (950)..(950): n is a, c, g, or t
  misc_feature (952)..(952): n is a, c, g, or t
  misc_feature (955)..(955): n is a, c, g, or t
  misc_feature (960)..(960): n is a, c, g, or t
  misc_feature (981)..(981): n is a, c, g, or t
  misc_feature (983)..(984): n is a, c, g, or t
  misc_feature (996)..(996): n is a, c, g, or t
  misc_feature (1002)..(1002): n is a, c, g, or t
  misc_feature (1004)..(1004): n is a, c, g, or t
  misc_feature (1012)..(1012): n is a, c, g, or t
  misc_feature (1015)..(1015): n is a, c, g, or t
  misc_feature (1019)..(1019): n is a, c, g, or t
  misc_feature (1024)..(1024): n is a, c, g, or t
  misc_feature (1027)..(1027): n is a, c, g, or t
  misc_feature (1030)..(1030): n is a, c, g, or t
  misc_feature (1032)..(1032): n is a, c, g, or t
  misc_feature (1034)..(1034): n is a, c, g, or t
  misc_feature (1036)..(1036): n is a, c, g, or t
  misc_feature (1043)..(1043): n is a, c, g, or t
  misc_feature (1051)..(1051): n is a, c, g, or t
aatagagaaattactatgagaggatcgcatcaccatcaccatcacggatcctatttaggtgacactatagaatcgtcgacccacgcgtccgtggcgaatggctcgtctgtagtgcacgccgcgggcccagctgcgaccccggccccgcccccgggaccccggccatggacgaactgttccccctcatcttcccggcagagccagcccaggcctctggcccctatgtggagatcattgagcagcccaagcagcggggcatgcgcttccgctacaagtgcgaggggcgctccgcgggcagcatcccaggcgagaggagcacagataccaccaagacccaccccaccatcaagatcaatggctacacaggaccagggacagtgcgcatctccctggtcaccaaggaccctcctcaccggcctcacccccacgagcttgtaggaaaggactgccgggatggcttctatgaggctgagctctgcccggaccgctgcatccacagtttccagaacctgggaatccagtgtgtgaagaagcgggacctggagcaggctatcagtcagcgcatccagaccaacaacaaccccttccaagttcctatagaagagcagcgtggggactacgacctgaatgctgtgcggctctgcttccaggtgacagtgcgggacccatcaggcaggcccctccgcctgccgcctgtcctttctcatcccatctttgacaatcgtgcccccaacactgccganctcaagatctgccgagtgaaccgaaactctggcagctgcctcggtggggatgaaatcttcctactgtgtgacaaggtgcaaaaagagganattgaggtgtatttcacgggaaccaggctgggaggcccgaggctccttttcncaagntgatgtgcaccnacaagtggccattgtgttccngaacccctcccttanncaaaacccaancntgnaggcntcctgtgcgtgttttccatgnannctgcggggggcntttccnancggaactnaanggancccantgnaantncnantacctgncaaaaaanaa

SEQ ID NO: 481 - DNA, 963 bp, Homo Sapiens
tgagaggatcgcatcaccatcaccatcacggatcctatttaggtgacactatagaatcgtcgacccacgcgtccggcaaaaacaagaactcactctcaggattgagtattgatgaaattgtccaaagagtgacagaacacattctagatgaacagaaaaagaaaaagccaaacccaggaaaggacaagaggacttatgagcccagctctgccacccccgtgaccaggtcctcccagggctcaccctcggtggttgttgcaccatcacccaaaaccaaggggcagaaagcagaagatgtccctgtgaggattgcactgggtgcaagttcctgtgaaatatgccacgaggtgttcaaatcaaaaaacgtgcgtgtgctcaaatgtgggcacaagtatcacaaagggtgctttaagcagtggcttaaagggcagagcgcttgcccggcctgccagggtcgtgatctcctgacagaagagtcaccttctggaagaggctggcccagtcagaatcaggagctgccttcctgctcttctaggtagtcacacttcactaaagtgtcatccaccagtgtgttgaatccgaagaatgacaattttctaccactggtgtaaaaaacaaacatttgaagacccttgtgcattgtgtgtcacaaagctaaatacatggaaatcgttaatatcgttgatattaagtaatttccccactctgagtgaatactttgatgattgccaacagtggctaataaaatgacggctaccacactcatgggtcactggggctgcgcagggctctttgaggtgggtggcttcttttggaaagtactatgaacgtctcgaagcagtattctagtgataagaattcttaacatagccaagcgccccacgtttgttccccacgtttgttccccttttctgtttgaaaaacctgttctggtagctccacaagagagatgatactgacttt

SEQ ID NO: 482 - DNA, 1237 bp, Homo Sapiens
  misc_feature (862)..(862): n is a, c, g, or t
  misc_feature (865)..(865): n is a, c, g, or t
  misc_feature (886)..(886): n is a, c, g, or t
  misc_feature (904)..(904): n is a, c, g, or t
  misc_feature (929)..(929): n is a, c, g, or t
  misc_feature (931)..(931): n is a, c, g, or t
  misc_feature (949)..(949): n is a, c, g, or t
  misc_feature (951)..(951): n is a, c, g, or t
  misc_feature (959)..(959): n is a, c, g, or t
  misc_feature (992)..(992): n is a, c, g, or t
  misc_feature (995)..(995): n is a, c, g, or t
  misc_feature (1010)..(1010): n is a, c, g, or t
  misc_feature (1032)..(1032): n is a, c, g, or t
  misc_feature (1035)..(1035): n is a, c, g, or t
  misc_feature (1041)..(1041): n is a, c, g, or t
  misc_feature (1043)..(1043): n is a, c, g, or t
  misc_feature (1046)..(1046): n is a, c, g, or t
  misc_feature (1058)..(1058): n is a, c, g, or t
  misc_feature (1062)..(1063): n is a, c, g, or t
  misc_feature (1069)..(1070): n is a, c, g, or t
  misc_feature (1081)..(1081): n is a, c, g, or t
  misc_feature (1085)..(1085): n is a, c, g, or t
  misc_feature (1090)..(1090): n is a, c, g, or t
  misc_feature (1103)..(1103): n is a, c, g, or t
  misc_feature (1120)..(1120): n is a, c, g, or t
  misc_feature (1132)..(1134): n is a, c, g, or t
  misc_feature (1136)..(1136): n is a, c, g, or t
  misc_feature (1162)..(1162): n is a, c, g, or t
  misc_feature (1167)..(1168): n is a, c, g, or t
  misc_feature (1178)..(1178): n is a, c, g, or t
  misc_feature (1204)..(1204): n is a, c, g, or t
  misc_feature (1210)..(1210): n is a, c, g, or t
  misc_feature (1219)..(1219): n is a, c, g, or t
  misc_feature (1229)..(1229): n is a, c, g, or t
  misc_feature (1232)..(1233): n is a, c, g, or t
  misc_feature (1237)..(1237): n is a, c, g, or t
agagagattactatgagaggatcgcatcaccatcaccatcacggatcctatttaggtgacactatagaatcgtcgacccacgcgtccggggtctaccccgagccccggagcgagagcgagtgcctgagcaacatccgcgagttcctgcgcggctgcggggcttccctgcggctggagacgtttgatgcaaatgatttgtatcaggggcagaattttaacaaggtcctcagttccttagtgactctaaataaagtaacagcagacatcgggctggggagtgactccgtgtgtgcccggccctcgtctcaccgcataaagtcttttgactcccttggatcacagtctttgcacactcggacttcaaaactgttccagggccagtatcggagtttggacatgaccgataatagcaacaatcaactggtagtaagagcaaagtttaacttccagcagaccaatgaggacgagctttccttctcaaaaggagacgtcatccatgtcacccgtgtggaagagggaggctggtgggagggcacactcaacggccggaccggctggttccccagcaactacgtgcgcgaggtcaaggccagcgagaagcctgtgtctcccaaatcaggaacactgaagagccctcccaaaggatttgatacgactgccataaacaaaagctattacaatgtggtgctacagaatattttagaaacagaaaatgaatattctaaagaacttcagactgtgctttcaacgtacctacggccattgcagaccagtgagaagttaagttcagcaaacatttcatatttaatgggaaatctagaagaaatatgttctttccagcaaatgctcgtacagtctttanaanaatgcaccaagttgcccgaanctcagcagagagtcggangctgcttttttaaacctgatgcccnanatgaaaaaccctgtaccncncgtattgngccaatcaccccttctggcagtgaatgtcctcncgnaacacagtgaggaanttgggggagttcatggaaaacnaanggggcnancanccctgggaattnccgnnctgacnnggggcctgaanaaanccttnatggccctggaanaaaaccctaccctgccncaaaaagctcgnnnanccctgggggattttcttccgaataanaaaanntcaaaatccngggtgcctcaaacctttcccccaatncaaaantccgaaaanaaaaatttgnctnnaatn

SEQ ID NO: 483 - DNA, 1096 bp, Homo Sapiens
  misc_feature (877)..(877): n is a, c, g, or t
  misc_feature (879)..(879): n is a, c, g, or t
  misc_feature (910)..(910): n is a, c, g, or t
  misc_feature (913)..(913): n is a, c, g, or t
  misc_feature (937)..(937): n is a, c, g, or t
  misc_feature (939)..(939): n is a, c, g, or t
  misc_feature (947)..(947): n is a, c, g, or t
  misc_feature (955)..(955): n is a, c, g, or t
  misc_feature (957)..(957): n is a, c, g, or t
  misc_feature (974)..(974): n is a, c, g, or t
  misc_feature (984)..(984): n is a, c, g, or t
  misc_feature (987)..(987): n is a, c, g, or t
  misc_feature (996)..(996): n is a, c, g, or t
  misc_feature (1005)..(1005): n is a, c, g, or t
  misc_feature (1007)..(1007): n is a, c, g, or t
  misc_feature (1015)..(1015): n is a, c, g, or t
  misc_feature (1025)..(1026): n is a, c, g, or t
  misc_feature (1041)..(1041): n is a, c, g, or t
  misc_feature (1045)..(1045): n is a, c, g, or t
  misc_feature (1049)..(1050): n is a, c, g, or t
  misc_feature (1057)..(1057): n is a, c, g, or t
  misc_feature (1059)..(1060): n is a, c, g, or t
  misc_feature (1062)..(1062): n is a, c, g, or t
  misc_feature (1066)..(1066): n is a, c, g, or t
  misc_feature (1073)..(1073): n is a, c, g, or t
  misc_feature (1076)..(1076): n is a, c, g, or t
  misc_feature (1084)..(1084): n is a, c, g, or t
  misc_feature (1092)..(1092): n is a, c, g, or t
  misc_feature (1096)..(1096): n is a, c, g, or t
tagagagattactatgagaggatcgcatcaccatcaccatcacggatcctatttaggtgacactatagaatcgtcgacccacgcgtccgagatcaaccagatcgccctcagcccttcgggcaccatgctgtacgccgcctcgggcaatgccgtccgcatctgggagcttagcaggttccagcctgtcggcaagctgactggccacatcggccctgtgatgtgcctgacggtcacccagacggccagccagcatgacctcgtggtgactggctccaaggaccactacgttaagatgttcgagctgggcgagtgtgtgacgggcaccatcggccccactcacaacttcgagcccccgcactacgatggcatcgagtgtctcgccatccagggagacatcctgttcagtggctcccgagataacggcatcaagaagtgggacctagaccagcaggagctcatccagcaaatccccaatgcgcacaaggactgggtgtgcgccctggccttcatcccgggccgccccatgctgctcagcgcctgccgtgcgggtgtcatcaaggtctggaacgtggacaacttcacacccatcggtgagatcaagggccacgacagtcccatcaatgccatctgcaccaatgccaagcatatcttcacagcctccagtgacctgacggtgaagttctggagtgtccggcggttaccccacagcggcccaccctaggagtgaggtcagagggatgcccccggaccctcgaccccagcagcctggacaccatggaagggaagctgtgacccggccgatggggccagctgctctggggacagagggcgtggccccctctcctgccctcctccctctccttggccttcccacagnanactgttccctcatccctcccctgcctctcangancctctgggtgaaaaaaagctgggnangaattaanctgtgaancnaagggcatatccttctngttctcctcnggnatctggcanattgtctcngntgaacggnttgccctttnnaggctttggccatgnggancctnngggagtnannanctgnccatccnccnttcaagantggctccntttn

SEQ ID NO: 484 - DNA, 1174 bp, Homo Sapiens
  misc_feature (851)..(851): n is a, c, g, or t
  misc_feature (967)..(967): n is a, c, g, or t
  misc_feature (990)..(990): n is a, c, g, or t
  misc_feature (993)..(993): n is a, c, g, or t
  misc_feature (996)..(996): n is a, c, g, or t
  misc_feature (1006)..(1006): n is a, c, g, or t
  misc_feature (1013)..(1013): n is a, c, g, or t
  misc_feature (1037)..(1037): n is a, c, g, or t
  misc_feature (1056)..(1056): n is a, c, g, or t
  misc_feature (1075)..(1075): n is a, c, g, or t
  misc_feature (1078)..(1078): n is a, c, g, or t
  misc_feature (1082)..(1082): n is a, c, g, or t
  misc_feature (1090)..(1090): n is a, c, g, or t
  misc_feature (1094)..(1094): n is a, c, g, or t
  misc_feature (1100)..(1100): n is a, c, g, or t
  misc_feature (1121)..(1122): n is a, c, g, or t
  misc_feature (1130)..(1130): n is a, c, g, or t
  misc_feature (1132)..(1132): n is a, c, g, or t
  misc_feature (1135)..(1135): n is a, c, g, or t
  misc_feature (1165)..(1165): n is a, c, g, or t
tagaggaaattactatgagaggatcgcatcaccatcaccatcacggatcctatttaggtgacactatagaatcgtcgacccacgcgtccggtttaaagatggcggcggaggaacctcagcagcagaagcaggagccgctgggcagcgactccgaaggtgttaactgtctggcctatgatgaagccatcatggctcagcaggaccgaattcagcaagagattgctgtgcagaaccctctggtgtcagagcggctggagctctcggtcctatacaaggagtatgctgaagatgacaacatctatcaacagaagatcaaggacctccacaaaaagtactcgtacatccgcaagaccaggcctgacggcaactgtttctatcgggctttcggattctcccacttggaggcactgctggatgacagcaaggagttgcagcggttcaaggctgtgtctgccaagagcaaggaagacctggtgtcccagggcttcactgaattcacaattgaggatttccacaacacgttcatggacctgattgagcaggtggagaagcagacctctgtcgccgacctgctggcctccttcaatgaccagagcacctccgactaccttgtggtctacctgcggctgctcacctcgggctacctgcagcgcgagagcaagttcttcgagcacttcatcgagggtggacggactgtcaaggagttctgccagcaggaggtggagcccatgtgcaaggagagcgaccacatccacatcattgcgctggcccaggccctcagcgtgtccatccaggtggagtacatggaccgcggcgagggcggcaccaccaatccgcacatcttccctganggctccgagcccaaggtctaccttctctaccggcctggacactacgatatcctctacaaatagggctggctccagcccgctgctgccctgctgccccccctctgcccaggcgctanacatgtacagaggttttttctgnggntgnaaatgggtcntatttcncccccttttttcctgtcacatgancccccccccatgttttatnaaagggggtgctggggggngancccnggggggcnggtnccctgntttggtggcccccctgggttnntttggttngntgnccccccccccccaggggggggccccccggntttttcccc

SEQ ID NO: 485 - DNA, 1179 bp, Homo Sapiens
  misc_feature (1)..(1): n is a, c, g, or t
  misc_feature (883)..(883): n is a, c, g, or t
  misc_feature (915)..(915): n is a, c, g, or t
  misc_feature (944)..(944): n is a, c, g, or t
  misc_feature (946)..(946): n is a, c, g, or t
  misc_feature (950)..(950): n is a, c, g, or t
  misc_feature (967)..(967): n is a, c, g, or t
  misc_feature (975)..(975): n is a, c, g, or t
  misc_feature (987)..(988): n is a, c, g, or t
  misc_feature (1000)..(1000): n is a, c, g, or t
  misc_feature (1012)..(1012): n is a, c, g, or t
  misc_feature (1015)..(1015): n is a, c, g, or t
  misc_feature (1032)..(1032): n is a, c, g, or t
  misc_feature (1037)..(1040): n is a, c, g, or t
  misc_feature (1051)..(1051): n is a, c, g, or t
  misc_feature (1054)..(1055): n is a, c, g, or t
  misc_feature (1058)..(1058): n is a, c, g, or t
  misc_feature (1067)..(1067): n is a, c, g, or t
  misc_feature (1079)..(1079): n is a, c, g, or t
  misc_feature (1093)..(1093): n is a, c, g, or t
  misc_feature (1102)..(1102): n is a, c, g, or t
  misc_feature (1104)..(1104): n is a, c, g, or t
  misc_feature (1133)..(1133): n is a, c, g, or t
  misc_feature (1158)..(1158): n is a, c, g, or t
  misc_feature (1160)..(1160): n is a, c, g, or t
  misc_feature (1162)..(1162): n is a, c, g, or t
  misc_feature (1166)..(1166): n is a, c, g, or t
  misc_feature (1170)..(1170): n is a, c, g, or t
  misc_feature (1176)..(1176): n is a, c, g, or t
naaaagagaaattactatgagaggatcgcatcaccatcaccatcacggatcctatttaggtgacactatagaatcgtcgacccacgcgtccggcctgagcctgagcctgagcccgagccgggagccggtcgcgggggctccgggctgtgggaccgctgggcccccagcgatggcgaccctgtggggaggccttcttcggcttggctccttgctcagcctgtcgtgcctggcgctttccgtgctgctgctggcgcagctgtcagacgccgccaagaatttcgaggatgtcagatgtaaatgtatctgccctccctataaagaaaattctgggcatatttataataagaacatatctcagaaagattgtgattgccttcatgtcgtggagcccatgcctgtgcgggggcctgatgtagaagcatactgtctacgctgtgaatgcaaatatgaagaaagaagctctgtcacaatcaaggttaccattataatttatctctccattttgggccttctacttctgtacatggtatatcttactctggttgagcccatactgaagaggcgcctctttggacatgcacagttgatacagagtgatgatgatattggggatcaccagccttttgcaaatgcacacgatgtgctagcccgctcccgcagtcgagccaacgtgctgaacaaggtagaatatgcacagcagcgctggaagcttcaagtccaagagcagcgaaagtctgtctttgaccggcatgttgtcctcagctaattgggaattgaattcaaggtgactagaaagaaacaggcagacaactggaaagaactgactgggttttgctgggtttcattttaataccttgttgatttcaccaactgttgctggaanaatcaaaactggaagcaaaaaacttgcttgantttttttttcttgttaacgtaataaaaananaaantttttaaaagcccacanctcaaagncagcccaaaaannccttttccctantttgggactttnacnaaaaaaaaaaaaaatcntgccnnnnaaattatcttngannccntttacctgnaaaaagcccctnctttttttcccccnaaaattttnancttgactttcaaaaaaaattttccggggnttttgggggggggtggttttttggntngnttgntttngggggnaaa

SEQ ID NO: 486 - DNA, 834 bp, Homo Sapiens
ctatgagaggatcgcatcaccatcaccatcacggatcctatttaggtgacactatagaatcgtcgacccacgcgtccgctgcgcgtcgtcctcctcgccctccaggccgcccgcgccgcgccggagtccgctgtccgccagctacccgcttcctgccgcccgccgctgccatgctgcccgccgcgctgctccgccgcccgggacttggccgcctcgtccgccacgcccgtgcctatgccgaggccgccgccgccccggctgccgcctctggccccaaccagatgtccttcaccttcgcctctcccacgcaggtgttcttcaacggtgccaacgtccggcaggtggacgtgcccacgctgaccggagccttcggcatcctggcggcccacgtgcccacgctgcaggtcctgcggccggggctggtcgtggtgcatgcagaggacggcaccacctccaaatactttgtgagcagcggttccatcgcagtgaacgccgactcttcggtgcagttgttggccgaagaggccgtgacgctggacatgttggacctgggggcagccaaggcaaacttggagaaggcccaggcggagctggtggggacagctgacgaggccacgcgggcagagatccagatccgaatcgaggccaacgaggccctggtgaaggccctggagtaggcggtgcgtacccggtgtcccgaggcccggccaggggctgggcagggatgccaggtgggcccagccagctcctggggtcccggccacctggggaagccgcgcctgccaaggaggccaccagagggcagtgcaggcttctgcctgggccccaggccct

SEQ ID NO: 487 - DNA, 1179 bp, Homo Sapiens
  misc_feature (774)..(774): n is a, c, g, or t
  misc_feature (824)..(824): n is a, c, g, or t
  misc_feature (834)..(834): n is a, c, g, or t
  misc_feature (887)..(887): n is a, c, g, or t
  misc_feature (910)..(910): n is a, c, g, or t
  misc_feature (929)..(929): n is a, c, g, or t
  misc_feature (931)..(931): n is a, c, g, or t
  misc_feature (946)..(946): n is a, c, g, or t
  misc_feature (964)..(964): n is a, c, g, or t
  misc_feature (976)..(976): n is a, c, g, or t
  misc_feature (985)..(985): n is a, c, g, or t
  misc_feature (1009)..(1009): n is a, c, g, or t
  misc_feature (1026)..(1026): n is a, c, g, or t
  misc_feature (1035)..(1035): n is a, c, g, or t
  misc_feature (1042)..(1042): n is a, c, g, or t
  misc_feature (1047)..(1047): n is a, c, g, or t
  misc_feature (1056)..(1056): n is a, c, g, or t
  misc_feature (1063)..(1063): n is a, c, g, or t
  misc_feature (1071)..(1071): n is a, c, g, or t
  misc_feature (1078)..(1078): n is a, c, g, or t
  misc_feature (1080)..(1080): n is a, c, g, or t
  misc_feature (1085)..(1085): n is a, c, g, or t
  misc_feature (1092)..(1092): n is a, c, g, or t
  misc_feature (1096)..(1096): n is a, c, g, or t
  misc_feature (1106)..(1106): n is a, c, g, or t
  misc_feature (1108)..(1108): n is a, c, g, or t
  misc_feature (1113)..(1113): n is a, c, g, or t
  misc_feature (1125)..(1125): n is a, c, g, or t
  misc_feature (1143)..(1143): n is a, c, g, or t
  misc_feature (1147)..(1147): n is a, c, g, or t
  misc_feature (1167)..(1167): n is a, c, g, or t
  misc_feature (1169)..(1169): n is a, c, g, or t
  misc_feature (1177)..(1177): n is a, c, g, or t
tagagaaattactatgagaggatcgcatcaccatcaccatcacggatcctatttaggtgacactatagaatcgtcgacccacgcgtccggtggctatgacaacgtggacatcaaggctgccggcgagctcggaattgccgtgtgcaacatcccgtctgcagccgtggaagagacagcggactctaccatctgccacatcctcaacctgtaccggaggaacacgtggctgtaccaggcactgcgggaaggcacgcgggttcagagcgtggagcagatccgcgaggtggcctcgggagcggcccgcatccgtggggagacgctgggcctcattggctttggtcgcacggggcaggcggttgcagttcgagccaaggcctttggattcagcgtcatattttatgacccctacttgcaggatgggatcgagcggtccctgggcgtgcagagggtctacaccctgcaggatttgctgtatcagagcgactgcgtctccttgcactgcaatctcaacgaacataaccaccacctcatcaatgactttaccataaagcagatgaggcagggagcattccttgtgaacgcagcccgtggcggcctggtggacgagaaagccttagcacaagccctcaaggagggcaggatacgaggggcagccctcgacgtgcatgagtcagagcccttcagctttgctcagggtccgttgaaagatgccccgaatctcatctgcactcctcacactgcctggtacagtgagcaggcgtcactggagatganggaagcagctgccaccgagatccgccgagccatcacaggtcgcatcccanaaagcttaanaaattgtgtgaacaaggaattctttgtcacatcagcgccttggtcagtaatanaccagcaagcaattcatcctganctcatggtgccacatacananatccgccaggcatcntgggtgtggctccaggangaattcctgcanccatggaanggatcatccctggaggcatcccantgactcaaaacctcccnaaaagtggnaaattcnttccnaaacgcctnttccaanccagcccnaaaaaananggggnaaaatcnaaancccccccacnanccaanaaccaaaaatgnccaaaaggtaatccctcnaaanaccttgggaaccaaaaaacngnggaaaatnat

SEQ ID NO: 488 - DNA, 998 bp, Homo Sapiens
  misc_feature (1)..(1): n is a, c, g, or t
  misc_feature (4)..(4): n is a, c, g, or t
  misc_feature (797)..(797): n is a, c, g, or t
  misc_feature (819)..(819): n is a, c, g, or t
  misc_feature (846)..(846): n is a, c, g, or t
  misc_feature (856)..(856): n is a, c, g, or t
  misc_feature (863)..(863): n is a, c, g, or t
  misc_feature (900)..(900): n is a, c, g, or t
  misc_feature (932)..(933): n is a, c, g, or t
  misc_feature (940)..(940): n is a, c, g, or t
  misc_feature (943)..(943): n is a, c, g, or t
  misc_feature (949)..(949): n is a, c, g, or t
  misc_feature (953)..(954): n is a, c, g, or t
  misc_feature (958)..(959): n is a, c, g, or t
  misc_feature (961)..(961): n is a, c, g, or t
  misc_feature (987)..(987): n is a, c, g, or t
  misc_feature (991)..(991): n is a, c, g, or t
  misc_feature (994)..(994): n is a, c, g, or t
  misc_feature (997)..(997): n is a, c, g, or t
naantagagaaattactatgagaggatcgcatcaccatcaccatcacggatcctatttaggtgacactatagaatcgtcgacccacgcgtccgcccacgcgtccgcccacgcgtccgcgcggcctcagccctgggcgctggggctcctgctctttctccttcctgggagcctgggcgcagaaagccacctctccctcctgtaccaccttaccgcggtgtcctcgcctgccccggggactcctgccttctgggtgtccggctggctgggcccgcagcagtacctgagctacaatagcctgcggggcgaggcggagccctgtggagcttgggtctgggaaaaccaggtgtcctggtattgggagaaagagaccacagatctgaggatcaaggagaagctctttctggaagctttcaaagctttggggggaaaaggtccctacactctgcagggcctgctgggctgtgaactgggccctgacaacacctcggtgcccaccgccaagttcgccctgaacggcgaggagttcatgaatttcgacctcaagcagggcacctggggtggggactggcccgaggccctggctatcagtcagcggtggcagcagcaggacaaggcggccaacaaggagctcaccttcctgctattctcctgcccgcaccgcctgcgggagcacctggagaggggccgcggaaacctggagtggaaggagcccccctccatgcgcctgaaggcccgacccagcagccctggcttttccgtgcttacctgcagcgccttctccttctaccctccgganctgcaacttcggttcctgcggnaatgggctggccgctggcaacggccanggtgacttcngcccaanagtgaaggatccttccacgcctcgtcgtcactaaaantcaaaagtggcgatgaacaccactactgctgnnattgtgnaancacgcngggnntggnncnacccctcagggtggaactggaaatcnccanccnaant

SEQ ID NO: 489 - DNA, 1342 bp, Homo Sapiens
  misc_feature (900)..(900): n is a, c, g, or t
  misc_feature (917)..(917): n is a, c, g, or t
  misc_feature (933)..(933): n is a, c, g, or t
  misc_feature (945)..(945): n is a, c, g, or t
  misc_feature (974)..(974): n is a, c, g, or t
  misc_feature (987)..(987): n is a, c, g, or t
  misc_feature (993)..(993): n is a, c, g, or t
  misc_feature (1004)..(1004): n is a, c, g, or t
  misc_feature (1021)..(1021): n is a, c, g, or t
  misc_feature (1029)..(1029): n is a, c, g, or t
  misc_feature (1031)..(1031): n is a, c, g, or t
  misc_feature (1034)..(1034): n is a, c, g, or t
  misc_feature (1040)..(1040): n is a, c, g, or t
  misc_feature (1042)..(1042): n is a, c, g, or t
  misc_feature (1047)..(1047): n is a, c, g, or t
  misc_feature (1050)..(1050): n is a, c, g, or t
  misc_feature (1067)..(1067): n is a, c, g, or t
  misc_feature (1078)..(1078): n is a, c, g, or t
  misc_feature (1084)..(1084): n is a, c, g, or t
  misc_feature (1097)..(1098): n is a, c, g, or t
  misc_feature (1100)..(1100): n is a, c, g, or t
  misc_feature (1102)..(1102): n is a, c, g, or t
  misc_feature (1126)..(1126): n is a, c, g, or t
  misc_feature (1152)..(1152): n is a, c, g, or t
  misc_feature (1157)..(1157): n is a, c, g, or t
  misc_feature (1168)..(1168): n is a, c, g, or t
  misc_feature (1173)..(1175): n is a, c, g, or t
  misc_feature (1181)..(1181): n is a, c, g, or t
  misc_feature (1199)..(1199): n is a, c, g, or t
  misc_feature (1205)..(1205): n is a, c, g, or t
  misc_feature (1208)..(1208): n is a, c, g, or t
  misc_feature (1212)..(1212): n is a, c, g, or t
  misc_feature (1214)..(1214): n is a, c, g, or t
  misc_feature (1224)..(1224): n is a, c, g, or t
  misc_feature (1229)..(1229): n is a, c, g, or t
  misc_feature (1232)..(1232): n is a, c, g, or t
  misc_feature (1241)..(1241): n is a, c, g, or t
  misc_feature (1248)..(1248): n is a, c, g, or t
  misc_feature (1261)..(1261): n is a, c, g, or t
  misc_feature (1265)..(1265): n is a, c, g, or t
  misc_feature (1283)..(1285): n is a, c, g, or t
  misc_feature (1290)..(1290): n is a, c, g, or t
  misc_feature (1303)..(1303): n is a, c, g, or t
  misc_feature (1307)..(1307): n is a, c, g, or t
  misc_feature (1309)..(1309): n is a, c, g, or t
  misc_feature (1316)..(1316): n is a, c, g, or t
  misc_feature (1331)..(1331): n is a, c, g, or t
attagagaaattactatgagaggatcgcatcaccatcaccatcacggatcctatttaggtgacactatagaatcgtcgacccacgcgtccgcttactctccagatggcaaagaatctccaagtgataagaaatccaaaactgatggttcccagaagactgagagttcaaccgaaggtaaagaacaagaagagaagtccggtgaagatggtgagaaagacacaaaggatgaccagacagagcaggaacctaatatgcttcttgaatctgaagatgagctacttgtagatgaagaagaagcagcagcactgctagaaagtggcagttcagtgggagacgagaccgatcttgctaatttaggtgatgtggcttctgatgggaaaaaggaaccatcagataaagctgtgaaaaaagatggaagtgcttcagcagcagcaaagaaaaagcttaaaaagcgtcgttttccagggagtatggaaggttttgtcactctagatgaggttggtgatgaggaagattcggaacttcagaaacttcgtaaatcgggcatggcatttaaatctggtgacaaaaatgatgatggtttggttgaaattaaggtggacaagatcgaggaacttgatcaagaaaacgaagcagcgttggaaaatggaattaaaaatgaggaaaacacagaaccaggtgctgaatcttctgagaacgctgatgatcccaacaaagatacaagtgaaaacgcagatggtcaaagtgatgagaacaaggacgactatacaatcccagatgagtatagaattggaccatatcagcccaatgttcctgttggtatagactatgtgatacctaaaacagggttttactgtaagctgtgttcactcttttatacaaatgaagaagttgcaaanaatactcattgcagcanccttcctcattatccnaaattaaagaanttttctgaataattggccaaaaaaccccnaaccgaagaaggnaacttnaagatgtgcanggagatttatgatttcnaagaaaananggntccttngnttttnaangttaacccttttttaanaccatactganagttanaaaaaaaactatnntncncttttttttaatggaaaaaaaaanaaaagtccgttcctgggtttaagggntttanaccaaaaaaanacccnnntggttnaatttaaggaaaattttngttttntcnaaangncccccaacanaatcnttngtaaaaatngcctccntagccctttaaancctncccccccaaaaaaaaatnnnaaccnttggaaaaagaantttntnttccccnttccaaaagtccccnttttttcctcc

SEQ ID NO: 490 - DNA, 1294 bp, Homo Sapiens
  misc_feature (1)..(1): n is a, c, g, or t
  misc_feature (4)..(4): n is a, c, g, or t
  misc_feature (859)..(859): n is a, c, g, or t
  misc_feature (875)..(875): n is a, c, g, or t
  misc_feature (948)..(948): n is a, c, g, or t
  misc_feature (950)..(950): n is a, c, g, or t
  misc_feature (963)..(963): n is a, c, g, or t
  misc_feature (972)..(972): n is a, c, g, or t
  misc_feature (975)..(975): n is a, c, g, or t
  misc_feature (986)..(986): n is a, c, g, or t
  misc_feature (996)..(996): n is a, c, g, or t
  misc_feature (1009)..(1009): n is a, c, g, or t
  misc_feature (1027)..(1027): n is a, c, g, or t
  misc_feature (1032)..(1032): n is a, c, g, or t
  misc_feature (1034)..(1034): n is a, c, g, or t
  misc_feature (1037)..(1037): n is a, c, g, or t
  misc_feature (1039)..(1039): n is a, c, g, or t
  misc_feature (1046)..(1046): n is a, c, g, or t
  misc_feature (1050)..(1050): n is a, c, g, or t
  misc_feature (1062)..(1062): n is a, c, g, or t
  misc_feature (1065)..(1065): n is a, c, g, or t
  misc_feature (1111)..(1111): n is a, c, g, or t
  misc_feature (1114)..(1114): n is a, c, g, or t
  misc_feature (1116)..(1116): n is a, c, g, or t
  misc_feature (1134)..(1134): n is a, c, g, or t
  misc_feature (1138)..(1138): n is a, c, g, or t
  misc_feature (1141)..(1142): n is a, c, g, or t
  misc_feature (1160)..(1160): n is a, c, g, or t
  misc_feature (1175)..(1175): n is a, c, g, or t
  misc_feature (1184)..(1184): n is a, c, g, or t
  misc_feature (1192)..(1192): n is a, c, g, or t
  misc_feature (1196)..(1196): n is a, c, g, or t
  misc_feature (1200)..(1200): n is a, c, g, or t
  misc_feature (1204)..(1204): n is a, c, g, or t
  misc_feature (1207)..(1207): n is a, c, g, or t
  misc_feature (1210)..(1210): n is a, c, g, or t
  misc_feature (1215)..(1215): n is a, c, g, or t
  misc_feature (1229)..(1229): n is a, c, g, or t
  misc_feature (1236)..(1236): n is a, c, g, or t
  misc_feature (1255)..(1255): n is a, c, g, or t
  misc_feature (1285)..(1285): n is a, c, g, or t
  misc_feature (1288)..(1289): n is a, c, g, or t
naantagagaaattactatgagaggatcgcatcaccatcaccatcacggatcctatttaggtgacactatagaatcgtcgacccacgcgtccgattctgtacagaagttaccaatttgtgcacagtgtgggaaaacaaagtgcatgatgaagtcttcagactgtgtcataaagcatgctggtgtatacagtactggccttgcaatggtgggtgcaatatgtgacttctgtgaagcttgggtttgccatggtaggaaatgtctcagtacacatgcttgtgcctgccctcttaccgatgctgagtgtgttgaatgtgaacgaggcgtgtgggaccatggaggcagaatattcagttgttctttttgccataactttctctgtgaagatgatcaatttgagcatcaagccagctgccaggttttagaggcagaaacatttaaatgtgtttcatgcaatcggcttggtcagcactcatgtctccgttgtaaggcttgtttctgtgatgatcatacaaggagcaaagtgtttaagcaagaaaaaggaaaacagcctccttgtcctaaatgtgggcatgaaactcaggagactaaggaccttagcatgtcaacacgctccctgaaatttggcaggcagactggaggtgaagagggagatggagcttctgggtatgatgcttattggaagaacctttcatctgataagtatggtgataccagctaccacgatgaggaggaggatgagtatgaagcagaggatgatgaagaggaagaagatgaaggcagaaaggattcagatactgagtcatcagatttgtttactaatttgaatttaggaaggacctatgctagtggctatgctcnctatgaggaacaaganaactaggggagctgctctggtggccgtgtgtgaaaagaaccaggaatgaatgtgtgtgcttgatgaattgggngnggtttgtccaaantaccttaanccncttaaccctgngcaaaaaaanaaatttacccttnaatgggcccaaaccaaanagggngnaancngtttttnaaanaacctgaaaaanccnggcttaagggcaaaaaaaaaaaatgaatttccaaattttaaaaatnttnanttgatccaaacccaattnaaantanncccgggaattggaatggnttacccgaattcccnaaaaaaaanggttttgncccntttnaaanccnttnttccnaaaaaaagggaaanggggggnaaaaattttgttttgaaanaaaataccggttttaaaaaaaaaaaccgcnttnntgggc

SEQ ID NO: 491 - DNA, 1179 bp, Homo Sapiens
  misc_feature (851)..(851): n is a, c, g, or t
  misc_feature (913)..(913): n is a, c, g, or t
  misc_feature (947)..(947): n is a, c, g, or t
  misc_feature (970)..(970): n is a, c, g, or t
  misc_feature (975)..(975): n is a, c, g, or t
  misc_feature (1003)..(1003): n is a, c, g, or t
  misc_feature (1005)..(1005): n is a, c, g, or t
  misc_feature (1044)..(1044): n is a, c, g, or t
  misc_feature (1046)..(1046): n is a, c, g, or t
  misc_feature (1050)..(1051): n is a, c, g, or t
  misc_feature (1079)..(1079): n is a, c, g, or t
  misc_feature (1091)..(1091): n is a, c, g, or t
  misc_feature (1101)..(1101): n is a, c, g, or t
  misc_feature (1109)..(1109): n is a, c, g, or t
  misc_feature (1111)..(1111): n is a, c, g, or t
  misc_feature (1115)..(1115): n is a, c, g, or t
  misc_feature (1121)..(1121): n is a, c, g, or t
  misc_feature (1138)..(1139): n is a, c, g, or t
  misc_feature (1144)..(1144): n is a, c, g, or t
  misc_feature (1147)..(1147): n is a, c, g, or t
  misc_feature (1150)..(1150): n is a, c, g, or t
  misc_feature (1155)..(1155): n is a, c, g, or t
  misc_feature (1166)..(1166): n is a, c, g, or t
  misc_feature (1170)..(1170): n is a, c, g, or t
  misc_feature (1175)..(1175): n is a, c, g, or t
  misc_feature (1179)..(1179): n is a, c, g, or t
tagagagattactatgagaggatcgcatcaccatcaccatcacggatcctatttaggtgacactatagaatcgtcgacccacgcgtccgcccacgcgtccgccctgacagcggagcattttgcagcactccagagcctgctcaaggcctcctcgaaagatgttgtcagacagctgtgtcaagaaagcttttccagttcagcccttggcttgaaaaaactcttggatgttacatgttccagcttgtctgtgacccaggaggaggcagaggaactgctccaggctctgcaccgcctcactaggctggtggcattccgtgacctgtcctctgccgaggcaattctggctctctttccagaaaatttccaccaaaacctcaaaaacctgctgacaaagatcatcctagaacatgtgtctacttggagaaccgaagcccaggcaaatcagatctctctgccacgcctggtcgatctggactggagagtggatatcaaaacctcctcagacagcatcagccgcatggccgtccccacctgcctgctccagatgaagatccaagaagatcccagcctatgcggagacaaaccctccatctcagctgtcaccgtggagctgagcaaagaaacactggacaccatgttagatggcctgggccgcatccgagaccaactctctgccgtggccagtaaatgatccagccagctgccagggccactgccatgacccagctgctcatgagtgataaatgtctccccatatgcaggctgcccttgcagctgcagctgacaacaggcaggatggtggggacagcagggggctactgccatccagaagttacagttggattgggaanaagcagccagatcccccgctgttctcactcatcttctttctctttctgaagctggagagcanaaaccccccatctttgaaaagctcctgagtgcancttaattaccaccatggcagggngaggnaaatttgcatcgtcagctgcctctgcananctgtttgaaaaattcaggcccaaatcatgcagcctatcnanaaannagtttatttccaacattaactctaatanttcatttccaancccaaaaacntggaaggnantcgnaaaggngatgccaccatttctgnnccttntcnggnaaccnggcaaaacccnaaanctggncctn

SEQ ID NO: 492 - DNA, 1398 bp, Homo Sapiens
atgactcctgtgaggatgcagcactccctggcaggtcagacctatgccgtgcccttcatccagccagacctgcggcgagaggaggccgtccagcagatggcggatgccctgcagtacctgcagaaggtctctggagacatcttcagcaggatctcccagcaggtagagcagagccggagccaggtgcaggccattggagagaaggtctccttggcccaggccaagattgagaagatcaagggcagcaagaaggccatcaaggtgttctccagtgccaagtaccctgctccagggcgcctgcaggaatatggctccatcttcacgggcgcccaggaccctggcctgcagagacgcccccgccacaggatccagagcaagcaccgccccctggacgagcgggccctgcaggagaagctgaaggactttcctgtgtgcgtgagcaccaagccggagcccgaggacgatgcagaagagggacttgggggtcttcccagcaacatcagctctgtcagctccttgctgctcttcaacaccaccgagaacctgtacaagaagtatgtcttcctggaccccctggctggtgctgtaacaaagacccatgtgatgctgggggcagagacagaggagaagctgtttgatgcccccttgtccatcagcaagagagagcagctggaacagcaggtcccagagaactacttctatgtgccagacctgggccaggtgcctgagatccatgttccatcctacctgcctgacctgcccggcattgccaacgacctcatgtacagtgccgacctgggccccggcattgccccctctgcccctggcaccattccagaactgcccaccttccacactgaggtagccgagcctctcaaggtagacctacaagatggggtactaacaccacccccaccgcccccaccaccacccccagctcctgaggtgctggccagtgcacccccactcccaccctcaaccgcggcccctgtaggccaaggcgccaggcaggacgacagcagcagcagcgcatctccttcagtccagggagctcccagggaagtggtcgacccctccggtggctgggccactctgctagagtccatccgccaagctgggggcatcggcaaggccaagctgcgcagcatgaaggagcgaaagctggagaagcagcagcagaaggagcaggagcaagtgagagccacgagccaaggtgggcacttgatgtcggatctcttcaacaagctggtcatgaggcgcaagggcatctctgggaaaggacctggggctggtgaggggcccggaggagcctttgtccgcgtgtcagactccatccctcctttgccgccaccgcagcagccacaggcagaggaggacgaggacgactgggaatcgtag

SEQ ID NO: 493 - DNA, 441 bp, Homo Sapiens
atgcccctggacccctaccactctgtgacgtgggggcacgcgcagggatcccatcattttgtgtttggggagctcagagtgcgcccaatcttggaatctttaagggatgagccagacccagacccgcggccttctagagagggtccggcagggagggtcggcgccctggcccggggtgggccggagccctgtgatgctgcatcgcccccaggaggagccagctgtgccccagagttggcgcggccgagagaggacaagagcgcgcagcaggcgaagctggagggcgggactcgactttgttgtcgctgcccggaggagtcgagactggtacccggaggagctgtctcaccaggagaccacgtcctggaagtgtccgggactcgcgggacctgtggctgcagaccccgccggcacgcaggcccagagctggcgcactcctga

SEQ ID NO: 494 - DNA, 2016 bp, Homo Sapiens
atgcaaccagacatgtccttgaatgtcattaagatgaaatccagtgacttcctggagagtgcagaactggacagcggaggctttgggaaggtgtctctgtgtttccacagaacccagggactcatgatcatgaaaacagtgtacaaggggcccaactgcattgagcacaacgaggccctcttggaggaggcgaagatgatgaacagactgagacacagccgggtggtgaagctcctgggcgtcatcatagaggaagggaagtactccctggtgatggagtacatggagaagggcaacctgatgcacgtgctgaaagccgagatgagtactccgctttctgtaaaaggaaggataattttggaaatcattgaaggaatgtgctacttacatggaaaaggcgtgatacacaaggacctgaagcctgaaaatatccttgttgataatgacttccacattaagatcgcagacctcggccttgcctcctttaagatgtggagcaaactgaataatgaagagcacaatgagctgagggaagtggacggcaccgctaagaagaatggcggcaccctctactacatggcgcccgagcacctgaatgacgtcaacgcaaagcccacagagaagtcggatgtgtacagctttgctgtagtactctgggcgatatttgcaaataaggagccatatgaaaatgctatctgtgagcagcagttgataatgtgcataaaatctgggaacaggccagatgtggatgacatcactgagtactgcccaagagaaattatcagtctcatgaagctctgctgggaagcgaatccggaagctcggccgacatttcctggcattgaagaaaaatttaggcctttttatttaagtcaattagaagaaagtgtagaagaggacgtgaagagtttaaagaaagagtattcaaacgaaaatgcagttgtgaagagaatgcagtctcttcaacttgattgtgtggcagtaccttcaagccggtcaaattcagccacagaacagcctggttcactgcacagttcccagggacttgggatgggtcctgtggaggagtcctggtttgctccttccctggagcacccacaagaagagaatgagcccagcctgcagagtaaactccaagacgaagccaactaccatctttatggcagccgcatggacaggcagacgaaacagcagcccagacagaatgtggcttacaacagagaggaggaaaggagacgcagggtctcccatgacccttttgcacagcaaagaccttacgagaattttcagaatacagagggaaaaggcactgcttattccagtgcagccagtcatggtaatgcagtgcaccagccctcagggctcaccagccaacctcaagtactgtatcagaacaatggattatatagctcacatggctttggaacaagaccactggatccaggaacagcaggtcccagagtttggtacaggccaattccaagtcatatgcctagtctgcataatatcccagtgcctgagaccaactatctaggaaatacacccaccatgccattcagctccttgccaccaacagatgaatctataaaatataccatatacaatagtactggcattcagattggagcctacaattatatggagattggtgggacgagttcatcactactagacagcacaaatacgaacttcaaagaagagccagctgctaagtaccaagctatctttgataataccactagtctgacggataaacacctggacccaatcagggaaaatctgggaaagcactggaaaaactgtgcccgtaaactgggcttcacacagtctcagattgatgaaattgaccatgactatgagcgagatggactgaaagaaaaggtttaccagatgctccaaaagtgggtgatgagggaaggcataaagggagccacggtggggaagctggcccaggcgctccaccagtgttccaggatcgaccttctgagcagcttgatttacgtcagccagaactaa

SEQ ID NO: 495 - DNA, 3654 bp, Homo Sapiens
atgtttctgtacaacttaaccttgcagagagccactggcatcagctttgccattcatggaaacttttctggaaccaaacaacaagaaattgttgtttcccgtgggaagatcttggagctgcttcgcccagaccccaacactggcaaagtacataccctactcactgtggaagtattcggtgttatccggtcactcatggcctttaggctgacaggtggcaccaaagactacattgtagttggcagtgactctggtcgaattgttattttggaataccagccatctaagaatatgtttgagaagattcaccaagaaacctttggcaagagtggatgccgtcgcatcgttcctggccagttcttagctgtggatcccaaagggcgagccgttatgattagtgccattgagaaacagaaattggtgtatattttgaacagagatgctgcagcccgacttaccatttcatctcccctggaagcccacaaagcaaacactttagtgtatcatgtagttggagtagatgtcggatttgaaaatccaatgtttgcttgtctggaaatggattatgaggaagcagacaatgatccaacaggggaagcagcagctaatacccagcagacacttactttctatgagctagaccttggtttaaatcatgtggtccgaaaatacagtgaacctttggaggaacacggcaacttccttattacagttccaggagggtcagatggtccaagtggagtactgatctgctctgaaaactatattacttacaagaactttggtgaccagccagatatccgctgtccaattcccaggaggcggaatgacctggatgaccctgaaagaggaatgatttttgtctgctctgcaacccataaaaccaaatcgatgttcttctttttggctcaaactgagcagggagatatctttaagatcactttggagacagatgaagatatggttactgagatccggctcaaatattttgatactgtacccgttgctgctgccatgtgtgtgcttaaaacagggttcctttttgtagcatcagaatttggaaaccattacttatatcaaattgcacatcttggagatgatgatgaagaacctgagttttcatcagccatgcctctggaagaaggagacacattcttttttcagccaagaccacttaaaaaccttgtgctggttgatgagttggacagcctctctcccattctgttttgccagatagctgatctggccaatgaagatactccacagttgtatgtggcctgtggtaggggaccccgatcatctctgagagtcctaagacatggacttgaggtgtcagaaatggctgtttctgagctacctggtaaccccaacgctgtctggacagtgcgtcgacacattgaagatgagtttgatgcctacatcattgtgtctttcgtgaatgccaccctagtgttgtccattggagaaactgtagaagaagtgactgactctgggttcctggggaccaccccgaccttgtcctgctccttattaggagatgatgccttggtgcaggtctatccagatggcattcggcacatacgagcagacaagagagtcaatgagtggaagacccctggaaagaaaacaattgtgaagtgtgcagtgaaccagcgacaagtggtgattgccctgacaggaggagagctggtctatttcgagatggatccttcaggacagctgaatgagtacacagaacggaaggagatgtcagcagatgtggtgtgcatgagtctggccaatgtaccccctggagagcagcggtctcgcttcctggctgtggggcttgtggacaacactgtcagaatcatctccctggatccctcagactgtttgcaacctctaagcatgcaggctctcccagcccagcctgagtccttgtgtatcgtggaaatgggtgggactgagaagcaggatgagctgggtgagaggggctcgattggcttcctatacctgaatattgggctacagaacggtgtgctgctgaggactgtcttggaccctgtcactggggatttgtctgatactcgcactcggtacctggggtcccgtcctgtgaagctcttccgagtccgaatgcaaggccaggaggcagtattggccatgtcaagccgctcatggttgagctattcttaccaatctcgcttccatctcaccccactgtcttacgagacactggaatttgcatcgggttttgcctcggaacagtgtcccgagggcattgtggccatctccaccaacaccctacggattttggcattagagaagctcggtgctgtcttcaatcaagtagccttcccactgcagtacacacccaggaaatttgtcatccaccctgagagtaacaaccttattatcattgaaacggaccacaatgcctacactgaggccacgaaagctcagagaaagcagcagatggcagaggaaatggtggaagcagcaggggaggatgagcgggagctggccgcagagatggcagcagcattcctcaatgaaaacctccctgaatccatctttggagctcccaaggctggcaatgggcagtgggcctctgtgatccgagtgatgaatcccattcaagggaacacactggaccttgtccagctggaacagaatgaggcagcttttagtgtggctgtgtgcaggttttccaacactggtgaagactggtatgtgctggtgggtgtggccaaggacctgatactaaacccccgatctgtggcagggggcttcgtctatacttacaagcttgtgaacaatggggaaaaactggagtttttgcacaagactcctgtggaagaggtccctgctgctattgccccattccaggggagggtgttgattggtgtggggaagctgttgcgtgtctatgacctgggaaagaagaagttactccgaaaatgtgagaataagcatattgccaattatatctctgggatccagactatcggacatagggtaattgtatctgatgtccaagaaagtttcatctgggttcgctacaagcgtaatgaaaaccagcttatcatctttgctgatgatacctacccccgatgggtcactacagccagcctcctggactatgacactgtggctggggcagacaagtttggcaacatatgtgtggtgaggctcccacctaacaccaatgatgaagtagatgaggatcctacaggaaacaaagccctgtgggaccgtggcttgctcaatggggcctcccagaaggcagaggtgatcatgaactaccatgtcggggagacggtgctgtccttgcagaagaccacgctgatccctggaggctcagaatcacttgtctataccaccttgtctggaggaattggcatccttgtgccattcacgtcccatgaggaccatgacttcttccagcatgtggaaatgcacctgcggtctgaacatccccctctctgtgggcgggaccacctcagctttcgctcctactacttccctgtgaagaatgtgattgatggagacctctgtgagcagttcaattccatggaacccaacaaacaaaagaacgtctctgaagaactggaccgaaccccacccgaagtgtccaagaaactcgaggatatccggacccgctacgccttctga

SEQ ID NO: 496 - DNA, 6192 bp, Homo Sapiens
atggcggacggggcaccccggccccagctttaccgcagcgtctcgttcaagctgctggagcgctggagcggcggccccgggctgagggaggaggacacggacacccccggcttgaggcgacgcgcctcgtgccggccgaccacggctgcccggggccagccctctcggcgcgtgtccaagctggcgtctgggcccctggccgcccccgcgcagccgcgcccgctccgcagcctctcgccgtcggttcgccagctctcccggcgcttcgacgcgccgcgtctggacgacggctccgctgggacccgagacggaggcgtcttacccgcggccgcggaagaagcggccgagggcccagcgcgaggagcctggcccagcgtcaccgagatgcgcaagctcttcggcggtcctggctccaggaggcccagcgccgactctgaatccccaggaacgcccagccccgacggtgccgcgtgggagcctccggctcgggagtcgcggcagccaccgacgccaccccctcggacatgcttccccctggcgggtctgcgttcggcgcggcccctgaccgggccggagaccgaagggaggctgcgccggccgcagcagcaacaggagcgggcgcagcgtccagcggatggtttacattcttggcatatcttctcccaaccgcaggccggggcccgggcctcctgctcctcctcctccatcgccgcctcctatcctgtcagccgcagtcgtgctgccagctccagcgaggaggaagaggagggcccgccgcagctgcctggagcccagagtccggcctaccacggcggccactcctcgggcagtgacgacgaccgagacggtgagggcggccaccgctggggagggaggcccgggctcaggcctggaagctccctattggatcaggactgcaggcctgacagtgatgggttaaatctaagcagcatgaactcagcaggggtttctgggagccctgagcccccaacatctccaagagcccctagagaagaaggactccgggagtggggtagtggctctccgccctgcgtcccaggtccccaggagggacttcggcctatgtctgactctgtgggaggagctttccgtgtggccaaggtgagctttccctcgtacctggccagccccgcaggctcccgcggtagcagccgttattccagcacggagaccctcaaggacgacgacctatggtctagtaggggttctgggggctggggcgtgtaccgctcccctagctttggagctggggaagggctcctgcggtcccaggctcgaacccgtgccaaaggacctggaggcacctctagggcattgagggatggaggatttgagcctgaaaagagtcgacagcggaagtccctgtcaaatccagatatcgcctcagagaccctgacgcttctcagtttcctgcgctcagacctttcagagctgagggtccgaaaacctggtgggagctccggggaccgtggaagcaaccccctagatggcagagactcaccatccgcaggtggccctgtggggcaacttgaacccatacccatcccagccccagcatcacctggcacgcgccccacactcaaggacttgacagccactctgcggagagcaaagtcattcacctgctctgagaagcccatggcccgccgcctgccccgcaccagtgctctgaagtccagctcctccgagctcctgctcacaggccctggtgccgaggaggatccgctgcccctcatcgtccaggaccaatatgtgcaggaggcccgccaggtttttgagaagatccagcgcatgggtgcccaacaagatgatggaagcgatgccccccctggaagccctgactgggcaggggatgtgacccgagggcagcggtcccaggaggagctctcaggccctgagtccagtctgacagatgaaggcattggggcagaccctgagcctcctgttgcagcattttgcggcctgggtaccacagggatgtggcgacctctttcctcatcctcggcccagacgaaccaccatggccctgggactgaggacagtctgggcgggtgggccctggtgtcgcctgagacccctcccacaccaggtgccctccgccgacgacgcaaagtcccaccttcaggttctggtgggagcgaattgagcaatggggaggcaggggaggcctacaggtccctgagtgacccaattcctcagcgccaccgggctgccacctctgaagagcctactgggttctctgtggacagcaacctcctgggctcactgagccccaagacagggctccctgccacctcagccatggatgagggcttgaccagtggtcacagtgactggtctgtgggcagtgaagagagcaagggatatcaggaggttattcagagcatagttcaggggcctggcaccctggggcgtgtggtggacgacaggattgctggcaaagcccccaagaagaaatccctgagtgaccccagccgccgtggggagctggctgggcctggattcgagggccctggaggggagcccatccgagaagttgagcccatgctgcctccatccagcagcgagcccatccttgtagagcagcgggcagagccagaagaacctggtgccaccaggagccgggcacagtctgaaagggccctacctgaggctctgcctccccctgccactgcccaccgaaactttcaccttgaccccaagctggctgacattctgtccccgaggctaatccgccgaggctccaagaagcgcccagctcggagtagtcaccaggagcttcggagagacgagggcagtcaggaccagactggcagcctgtctcgggcccggccctcctccagacacgttcgccatgccagtgtgcccgccacatttatgcctattgtggtgcctgagccaccaacttctgttggtccccctgtggctgtgccagaacccataggcttccctacccgagcccatcccacgttgcaggcaccatcgctcgaggacgtcaccaagcagtacatgctgaacctgcactccggtgaggtccctgccccagtgccagtggacatgccctgcttgcctctggctgcaccgccctctgctgaggccaagccccctgaggcagctcggcctgcagatgagcctacccctgccagcaagtgctgcagcaagccacaggtggacatgcggaagcacgtggccatgaccctgctggacacagagcagtcgtatgtggagtcgctgcgcaccctgatgcagggctacatgcagccgctgaagcagccagagaactccgtgctctgtgacccttcactggtggacgagatcttcgaccagatccccgagctcctggagcaccacgagcaattcctggagcaggttcggcactgcatgcagacctggcatgcccagcagaaggtgggagccctgctcgtccagtcgttctccaaggatgtcctagtaaacatctattctgcctatatcgataacttcctcaatgcaaaggatgctgtgcgtgtggccaaggaggcgaggcctgcctttctcaagttcctagagcaaagcatgcgtgagaacaaggagaagcaggcgctgtctgacctcatgatcaagcctgtgcagcggatcccacgctacgagcttctggtgaaggacctcctgaagcatacacctgaggaccacccggaccatccactcctgctggaggcgcagcggaacatcaagcaggtggctgagcgcatcaacaagggtgtgcggagtgccgaggaggcggagcgccatgcccgtgtgctgcaggagatagaggctcacatcgagggcatggaggatctccaggcccctctgcggcggttcctgagacaggagatggtcattgaagtgaaggcgatcggtggcaagaaggaccggtctctcttcctgttcacggacctcatcgtctgcaccactctgaagcgaaagtcaggctccctgcggcgcagctccatgagcctgtacacggcagccagtgtcattgacacagccagcaagtacaagatgctgtggaagctgccgctggaagacgcagacatcatcaaaggggcatcccaagccaccaatcgggagaacatccagaaggccatcagccgccttgatgaggacctcaccaccctgggccaaatgagcaagctctctgagagccttggtttcccccaccagagcctggacgatgcactgcgggacctctcagctgccatgcaccgggacctgtcggagaagcaggcgctgtgctacgcgctttccttcccgccaaccaagctggagctgtgcgccactcggcccgagggcaccgactcctacatttttgagttccctcaccctgacgcccgccttggttttgaacaggccttcgatgaggccaagaggaagctggcatccagcaaaagctgtctagaccctgagttcctgaaggccatccccatcatgaaaacccgcagtggcatgcagttctcctgtgcggctcccaccctgaacagctgcccggagccctcgcctgaggtatgggtctgcaacagcgacggctacgtgggccaggtgtgcctgctgagcctgcgcgccgagccggacgtggaggcctgcatcgccgtctgttccgcccgcatcctctgcatcggggcggtgcccgggctgcagcctcgctgccaccgggagcctcctccgtcgctgaggagtcctccagagacggcaccggagcccgccgggccggagctggacgtcgaggccgctgcagacgaggaagccgcgacgctcgcggagccggggccgcagccctgccttcacatctccattgcaggctcgggcttggagatgacgccgggcctcggcgagggtgacccccgcccagagctggtgccctttgacagtgactctgacgatgagtcttcgcccagcccctcggggacgctgcagagccaggccagccggtccaccatctcctccagctttggcaatgaggagaccccgagttccaaggaggccacggcagagaccaccagctcagaggaggagcaggagccaggcttcctgccactgtctggctcctttgggcctggtggtccctgcggcaccagcccaatggatgggagagcccttcgccgctccagccacggctccttcacccggggcagccttgaggacctgctgagtgtcgaccctgaggcctaccagagctccgtgtggctgggcactgaggatggctgtgtccacgtgtaccagtcctccgacagcatccgtgaccgcaggaacagcatgaagctccagcatgcggcctctgtgacctgcatcttgtatctgaataaccaggtgtttgtgtctctggccaatggagagcttgtggtctaccaaagggaagcaggccatttctgggacccccagaacttcaaatcagtgaccttgggcacccaggggagccccatcaccaagatggtatctgtgggtgggcggctgtggtgtggctgccagaaccgagtccttgtcctgagccctgacacgctgcagctggagcacatgttttacgtgggtcaggattcaagccgctgcgtggcttgcatggtggactccagcctgggtgtgtgggtgacattgaaaggtagtgcccacgtgtgtctctaccatccagacacctttgagcagctggcagaagtagacgtcactcctcccgtgcacaggatgctggcaggctcggatgccatcatccggcagcacaaggctgcctgtctgcgaatcacagcgctgctggtgtgtgaggagctgctgtgggtgggcaccagtgctggtgtcgtcctcaccatgcccacttcgcccggtactgtcagctgcccacgggcaccactcagtcccacaggcctcggccagggacacaccggccacgtccgcttcttggctgcagtccagctgccagatggcttcaacctgctctgcccaaccccaccacctcccccagacacaggccccgagaagctgccatcactggagcaccgggactccccttggcaccgaggccccgcccctgccaggcctaaaatgctggttatcagtggaggtgatggctatgaggacttccgactcagcagtgggggcggcagcagcagtgagactgtgggtcgagacgacagcacaaaccacctcctcctgtggagggtgtga

SEQ ID NO: 497 - DNA, 543 bp, Homo Sapiens
atgggagacaagaagagccccaccaggccgaagcggcagccgaagccgtcctcggatgagggttactgggactgtagcgtctgcaccttccggaacagcgccgaggccttcaagtgcatgatgtgcgatgtgcggaagggcacctccacccggaaacctcgacctgtctcccagttggttgcacagcaggttactcagcagtttgtgcctcctacacagtcaaagaaagagaaaaaagataaagtagaaaaagaaaaaagtgaaaaggaaacaactagcaaaaagaatagccataagaaaaccaggccaagattgaaaaatgtggatcggagtagtgctcagcatttggaagttactgttggagatctgacagtcattattacagactttaaggagaaaacaaagtcaccgcctgcatctagtgctgcttctgcagatcaacacagtcaaagcggctctagctctgataacacagagagaggaatgtccaggtcatcttcacccagaggagaagcctcatcattgaatggagaatctcattaa

SEQ ID NO: 498 - DNA, 888 bp, Homo Sapiens
atggggctgccagtgtcctgggcccctcctgccctctgggttctagggtgctgcgccctgctcctctcgctgtgggcgctgtgcacagcctgccgcaggcccgaggacgctgtagcccccaggaagagggcgcggaggcagcgggcgaggctgcagggcagtgcgacggcggcggaagcgtccctactgaggcggacccacctctgctccctcagcaagtcggacaccagactgcacgagctgcaccggggcccgcgcagcagcagggccctgcggcctgccagcatggatctcctgcgcccacactggctggaggtgtccagggacatcaccggaccgcaggcagccccctctgccttcccacaccaggagctgccccgggctctgccggcagctgcagccaccgcagggtgcgctggcctcgaggccacctattccaacgtggggctggcggcccttcccggggtcagcctggcggccagccctgtggtggccgagtatgcccgcgtccagaagcgcaaagggacccatcgcagtccccaagagccacagcaggggaagactgaggtgaccccggccgctcaggtggacgtcctgtactccagggtctgcaagcctaaaaggagggacccaggacccaccacagacccgctggaccccaagggccagggagcgattctggccctggcgggtgacctggcctaccagaccctcccgctcagggccctggatgtggacagcggccccctggaaaacgtgtatgagagcatccgggagctgggggaccctgctggcaggagcagcacgtgcggggctgggacgccccctgcttccagctgccccagcctagggaggggctggagacccctccctgcctccctgccctga

SEQ ID NO: 499 - DNA, 462 bp, Homo Sapiens
atggcccggaacacgctgtcctcgcgcttccgccgggtggacatcgacgaatttgacgagaacaaatttgtggacgagcaggaggaggcggcggcggcggcggcggagccaggcccggacccgagcgaggtggacgggctcctgcggcaaggggacatgcttcgggcattccatgcagccttgcggaactctcccgtcaacaccaagaatcaagctgtgaaggagcgagcccagggcgtggtgctgaaagtgctcacaaacttcaagagcagtgagattgagcaggctgtgcagtcactggacagaaacggcgttgacttgttaatgaagtacatttataaaggctttgagaagcccacagaaaatagcagcgcagtgttactccagtggcacgaaaaggccttagcagtaggaggactaggctccattataagagttcttacagcaagaaagactgtttaa

SEQ ID NO: 500 - DNA, 312 bp, Homo Sapiens
atgtcagactgctacacggagctggagaaggcagtcattgtcctggtggaaaacttctacaaatatgtgtctaagtacagcctggtcaagaacaagatcagcaagagcagcttccgcgagatgctccagaaagagctgaaccacatgctgtcggacacagggaaccggaaggctgcggataagctcatccagaacctggatgccaatcatgatgggcgcatcagcttcgatgagtactggaccttgataggcggcatcaccggccccatcgccaaactcatccatgagcaggagcagcagagcagcagctag

SEQ ID NO: 501 - DNA, 525 bp, Homo Sapiens
atggggaagatcaccctctacgaggaccggggcttccagggccgccactatgaatgcagcagcgaccaccccaacctgcagccctacttgagccgctgcaactcggcgcgcgtggacagcggctgctggatgctctatgagcagcccaactactcgggcctccagtacttcctgcgccgcggcgactatgccgaccaccagcagtggatgggcctcagcgactcggtccgctcctgccgcctcatcccccactctggctctcacaggatcagactctatgagagagaggactacagaggccagatgatagagttcactgaggactgctcctgtcttcaggaccgcttccgcttcaatgaaatccactccctcaacgtgctggagggctcctgggtcctctacgagctgtccaactaccgaggacggcagtacctgctgatgccaggggactataggcgctaccaggactggggggccacgaatgccagagtgggctctctgaggagagtcatagatttctcctga

SEQ ID NO: 502 - DNA, 8772 bp, Homo Sapiens
atgcggagcccggccaccggcgtccccctcccaacgccgccgccgccgctgctgctgctgttgctgctgctgctgccgccgccactattgggagaccaagtggggccctgtcgttccttggggtccaggggacgaggctcttcgggggcctgcgcccccatgggctggctctgtccatcctcagcgtcgaacctctggctctacaccagccgctgcagggatgcgggcactgagctgactggccacctggtaccccaccacgatggcctgagggtttggtgtccagaatccgaggcccatattcccctaccaccagctcctgaaggctgcccctggagctgtcgcctcctgggcattggaggccacctttccccacagggcaagctcacactgcccgaggagcacccgtgcttaaaggctccacggctcagatgccagtcctgcaagctggcacaggcccccgggctcagggcaggggaaaggtcaccagaagagtccctgggtgggcgtcggaaaaggaatgtaaatacagccccccagttccagccccccagctaccaggccacagtgccggagaaccagccagcaggcacccctgttgcatccctgagggccatcgacccggacgagggtgaggcaggtcgactggagtacaccatggatgccctctttgatagccgctccaaccagttcttctccctggacccagtcactggtgcagtaaccacagccgaggagctggatcgtgagaccaagagcacccacgtcttcagggtcacggcgcaggaccacggcatgccccgacgaagtgccctggctacactcaccatcttggttactgacaccaatgaccatgaccctgtgttcgagcagcaggagtacaaggagagcctcagggagaacctggaggttggctatgaggtgctcactgtcagggccacggatggtgatgcccctcccaatgccaatattctgtaccgcctgctggaggggtctgggggcagcccctctgaagtctttgagatcgaccctcgctctggggtgatccgaacccgtggccctgtggatcgggaagaggtggaatcctaccagctgacggtagaggcaagtgaccagggtcgggacccgggtcctcggagtaccacagccgctgttttcctttctgtggaggatgacaatgataatgccccccagtttagtgagaagcgctatgtggtccaggtgagggaggatgtgactccaggggccccagtactccgagtcacagcctcggatcgagacaaggggagcaatgccgtggtgcactatagcatcatgagtggcaatgctcggggacagttttatctggatgcccagactggagctctggatgtggtgagccctcttgactatgagacgaccaaggagtacaccctacgggtgcgagcacaggatggtggccgtcccccactctctaatgtctctggcttggtgacagtacaggtcctggatatcaacgacaatgcccccatcttcgtcagcacccctttccaggctactgtcctggagagtgtccccttaggctacctggttctccatgtccaggctatcgacgctgatgctggtgacaatgcccgcctggaataccgccttgctggggtgggacatgacttccccttcaccatcaacaatggcacaggctggatctctgtggctgctgaactggaccgggaggaagttgatttctacagctttggggtagaagctcgagaccatggcactccagcactcactgcctcggccagtgtcagcgtgactgtcctggatgtcaacgacaacaatccaacctttacccaaccagagtacacagtgcggctcaatgaggatgcagctgtgggcaccagcgtggtgacggtgtcagctgtggaccgtgatgctcatagtgtcatcacctaccagatcaccagtggcaatactcgaaaccgcttctccatcaccagccaaagtggtggtgggctggtatcccttgccctgccactggactacaaacttgagcggcagtatgtgttggctgttaccgcctccgatggcactcggcaggacacggcacagattgtggtgaatgtcaccgacgccaacacccatcgtcctgtctttcagagctcccactatacagtgaatgttaatgaggaccggccggcaggcaccacggtggtgctgatcagcgccacggatgaggacacaggtgagaatgcccgcatcacctacttcatggaggacagcatcccccagttccgcatcgatgcagacacgggggctgtcaccacccaggctgagctggactatgaagaccaagtgtcttacaccctggccattactgctcgggacaatggcattccccagaagtccgacaccacctacctggagatcctggtgaacgacgtgaatgacaatgcccctcagttcctgcgagactcctaccagggcagtgtctatgaggatgtgccacccttcactagcgtcctgcagatctcagccactgatcgtgattctggacttaatggcagggtcttctacaccttccaaggaggcgacgatggagacggtgactttattgttgagtccacgtcaggcatcgtgcgaacgctacggaggctggatcgagagaacgtggcccagtatgtcttgcgggcatatgcagtggacaaggggatgcccccagcccgcacacctatggaagtgacagtcactgtgttggatgtgaatgacaatccccctgtctttgagcaggatgagtttgatgtgtttgtggaagagaacagccccattgggctagccgtggcccgggtcacagccactgaccccgatgaaggcaccaatgcccagattatgtaccagattgtggagggcaacatccctgaggtctttcagctggacatcttctccggggagctgacagccctggtagacttagactacgaggaccggcctgagtacgtcctggtcatccaggccacgtcagctcctctggtgagccgggctacagtccacgtccgcctccttgaccgcaatgacaacccaccagtgctgggcaactttgagatccttttcaacaactatgtcaccaatcgctcaagcagcttccctgggggtgccattggccgagtacctgcccatgaccctgatatctcagatagtctgacttacagctttgagcggggaaatgaactcagcctggtcctgctcaatgcctccacgggtgagctgaagctaagccgcgcactggacaacaaccggcctctggaggccatcatgagcgtgctggtgtcagacggcgtacacagcgtgaccgcccagtgcgcgctgcgtgtgaccatcatcaccgatgagatgctcacccacagcatcacgctgcgcctggaggacatgtcacccgagcgcttcctgtcaccactgctaggcctcttcatccaggcggtggccgccacgctggccacgccaccggaccacgtggtggtcttcaacgtacagcgggacaccgacgcccccgggggccacatcctcaacgtgagcctgtcggtgggccagccgccagggcccgggggcgggccgcccttcctgccctctgaggacctgcaggagcgcctatacctcaaccgcagcctgctgacggccatctcggcacagcgcgtgctgcccttcgacgacaacatctgcctgcgggagccctgcgagaactacatgcgctgcgtgtcggtgctgcgcttcgactcctccgcgcccttcatcgcctcctcctccgtgctcttccggcccatccaccccgtcggagggctgcgctgccgctgcccgcccggcttcacgggtgactactgcgagaccgaggtggacctctgctactcgcggccctgtggcccccacgggcgctgccgcagccgcgagggcggctacacctgcctctgtcgtgatggctacacgggtgagcactgtgaggtgagtgctcgctcaggccgttgcaccccgggtgtctgcaagaatgggggcacctgtgtcaacctgctggtgggcggtttcaagtgcgattgcccatctggagacttcgagaagccctactgccaggtgaccacgcgcagcttccccgcccactccttcatcacctttcgcggcctgcgccagcgtttccacttcaccctggccctctcgtttgccacaaaggagcgcgacgggttgctgttgtacaatgggcgtttcaatgagaagcatgactttgtggccctcgaggtgatccaggagcaggtccagctcaccttctctgcaggggagtcaaccaccacggtgtccccattcgtgcccggaggagtcagtgatggccagtggcatacggtgcagctgaaatactacaataagccactgttgggtcagacagggctcccacagggcccatcagagcagaaggtggctgtggtgaccgtggatggctgtgacacaggagtggccttgcgcttcggatctgtcctgggcaactactcctgtgctgcccagggcacccagggtggcagcaagaagtctctggatctgacggggcccctgctactaggcggggtgcctgacctgcccgagagcttcccagtccgaatgcggcagttcgtgggctgcatgcggaacctgcaggtggacagccggcacatagacatggctgacttcattgccaacaatggcaccgtgcctggctgccctgccaagaagaacgtgtgtgacagcaacacttgccacaatgggggcacttgcgtgaaccagtgggacgcgttcagctgcgagtgccccctgggctttgggggcaagagctgcgcccaggaaatggccaatccacagcacttcctgggcagcagcctggtggcctggcatggcctctcgctgcccatctcccaaccctggtacctcagcctcatgttccgcacgcgccaggccgacggtgtcctgctgcaggccatcaccagggggcgcagcaccatcaccctacagctacgagagggccacgtgatgctgagcgtggagggcacagggcttcaggcctcctctctccgtctggagccaggccgggccaatgacggtgactggcaccatgcacagctggcactgggagccagcggggggcccggccatgccattctgtccttcgattatgggcagcagagagcagagggcaacctgggcccccggctgcatggtctgcacctgagcaacataacagtgggcggaatacctgggccagccggcggtgtggcccgtggctttcggggctgtttgcagggtgtgcgggtgagcgatacgccggagggggttaacagcctggatcccagccatggggagagcatcaacgtggagcaaggctgtagcctgcctgacccttgtgactcaaacccgtgtcctgctaacagctattgcagcaacgactgggacagctattcctgcagctgtgatccaggttactatggtgacaactgtactaatgtgtgtgacctgaacccgtgtgagcaccagtctgtgtgtacccgcaagcccagtgccccccatggctatacctgcgagtgtcccccaaattaccttgggccatactgtgagaccaggattgaccagccttgtccccgtggctggtggggacatcccacatgtggcccatgcaactgtgatgtcagcaaaggctttgacccagactgcaacaagacaagcggcgagtgccactgcaaggagaaccactaccggcccccaggcagccccacctgcctcttgtgtgactgctaccccacaggctccttgtccagagtctgtgaccctgaggatggccagtgtccatgcaagccaggtgtcatcgggcgtcagtgtgaccgctgtgacaacccttttgctgaggtcaccaccaatggctgtgaagtgaattatgacagctgcccacgagcgattgaggctgggatctggtggccccgtacccgcttcgggctgcctgctgctgctccctgtcccaaaggctcctttgggactgctgtgcgccactgtgatgagcacagggggtggctccccccaaacctcttcaactgcacgtccatcaccttctcagaactgaagggcttcgctgagcggctacagcggaatgagtcaggcctagactcagggcgctcccagcagctagccctgctcctgcgcaacgccacgcagcacacagctggctacttcggcagcgacgtcaaggtggcctaccagctggccacgcggctgctggcccacgagagcacccagcggggctttgggctgtctgccacacaggacgtgcacttcactgagaatctgctgcgggtgggcagcgccctcctggacacagccaacaagcggcactgggagctgatccagcagacagagggtggcaccgcctggctgctccagcactatgaggcctacgccagtgccctggcccagaacatgcggcacacctacctaagccccttcaccatcgtcacgcccaacattgtcatctccgtagtgcgcttggacaaagggaactttgctggggccaagctgccccgctacgaggccctgcgtggggagcagcccccggaccttgagacaacagtcattctgcctgagtctgtcttcagagagacgccccccgtggtcaggcccgcaggccccggagaggcccaggagccagaggagctggcacggcgacagcgacggcacccggagctgagccagggtgaggctgtggccagcgtcatcatctaccgcaccctggccgggctactgcctcataactatgaccctgacaagcgcagcttgagagtccccaaacgcccgatcatcaacacacccgtggtgagcatcagcgtccatgatgatgaggagcttctgccccgggccctggacaaacccgtcacggtgcagttccgcctgctggagacagaggagcggaccaagcccatctgtgtcttctggaaccattcaatcctggtcagtggcacaggtggctggtcggccagaggctgtgaagtcgtcttccgcaatgagagccacgtcagctgccagtgcaaccacatgacgagcttcgctgtgctcatggacgtttctcggcgggagaatggggagatcctgccactgaagacactgacatacgtggctctaggtgtcaccttggctgcccttctgctcaccttcttcttcctcactctcttgcgtatcctgcgctccaaccaacacggcatccgacgtaacctgacagctgccctgggcctggctcagctggtcttcctcctgggaatcaaccaggctgacctcccttttgcctgcacagtcattgccatcctgctgcacttcctgtacctctgcaccttttcctgggctctgctggaggccttgcacctgtaccgggcactcactgaggtgcgcgatgtcaacaccggccccatgcgcttctactacatgctgggctggggcgtgcctgccttcatcacagggctagccgtgggcctggaccccgagggctacgggaaccctgacttctgctggctctccatctatgacacgctcatctggagttttgctggcccggtggcctttgccgtctcgatgagtgtcttcctgtacatcctggcggcccgggcctcctgtgctgcccagcggcagggctttgagaagaaaggtcctgtctcgggcctgcagccctccttcgccgtcctcctgctgctgagcgccacgtggctgctggcactgctctctgtcaacagcgacaccctcctcttccactacctctttgctacctgcaattgcatccagggccccttcatcttcctctcctatgtggtgcttagcaaggaggtccggaaagcactcaagcttgcctgcagccgcaagcccagccctgaccctgctctgaccaccaagtccaccctgacctcgtcctacaactgccccagcccctacgcagatgggcggctgtaccagccctacggagactcggccggctctctgcacagcaccagtcgctcgggcaagagtcagcccagctacatccccttcttgctgagggaggagtccgcactgaaccctggccaagggccccctggcctgggggatccaggcagcctgttcctggaaggtcaagaccagcagcatgatcctgacacggactccgacagtgacctgtccttagaagacgaccagagtggctcctatgcctctacccactcatcagacagtgaggaggaagaagaggaggaggaagaggaggccgccttccctggagagcagggctgggatagcctgctggggcctggagcagagagactgcccctgcacagtactcccaaggatgggggcccagggcctggcaaggccccctggccaggagactttgggaccacagcaaaagagagtagtggcaacggggcccctgaggagcggctgcgggagaatggagatgccctgtctcgagaggggtccctaggcccccttccaggctcttctgcccagcctcacaaaggcatccttaagaagaagtgtctgcccaccatcagcgagaagagcagcctcctgcggctccccctggagcaatgcacagggtcttcccggggctcctccgctagtgagggcagccggggaggcccccctccccgcccaccgccccggcagagcctccaggagcagctgaacggggtcatgcccatcgccatgagcatcaaggcaggcacggtggatgaggactcgtcaggctccgaatttctcttctttaacttcctgcattaa

SEQ ID NO: 503 - DNA, 3963 bp, Homo Sapiens
atgtttgggctggaccaattcgagccccaggtcaacagcaggaacgctggccagggcgagaggaactttaacgagaccggactgagcatgaacacccactttaaggccccggctttccacactggggggccccctggccctgtggatcctgctatgagcgcgctgggcgaacccccgatcttgggcatgaacatggagccctacggcttccacgcgcgcggccactcggagttgcacgcaggggggctgcaagcgcagcctgtgcacggcttctttggcggccagcagcctcaccacggccacccgggaagtcatcatccccaccagcatcacccccactttgggggcaacttcggtggcccggaccccggggcctcgtgcctgcacgggggtcgcctgctcggctacggcggcgcagccggaggcctgggcagccagccgcccttcgccgagggctatgagcacatggcggagagccaggggcctgagagcttcggcccgcagcgaccggggaacctcccggacttccacagttcaggtgcctccagccacgccgtgccggccccatgcctgccgctggaccagagccctaaccgagccgcctccttccacggcctgccgtcctccagcggctccgattcccacagtctggagccacggagggtgacgaaccaaggagccgtcgactcgctggaatacaattacccgggcgaggcgccctcgggacattttgacatgttttcgccctctgactccgaagggcagctgcctcattatgcagcgggtcgccaggttcctgggggcgctttcccgggcgcctcggccatgcccagagctgcgggcatggtgggcttgtccaaaatgcacgcccagccaccgcagcagcagccccagcagcagcagcagccccagcagcagcagcagcagcatggtgtgttctttgagaggttcagtggggccagaaagatgcctgtgggtctggagccctcagtgggctccaggcacccgttaatgcagcctccccagcaggccccgccaccccctcagcagcagcccccgcagcagccgccacagcagcagccgccgccgccacccgggcttctagtccgacaaaattcgtgcccgcctgcgctccctcggccccagcagggcgaggcgggcacgcccagcggcggcctgcaggacggaggccccatgctgcccagccagcacgcgcaattcgagtatcccatccaccggctggagaaccggagcatgcacccttattccgagcctgttttcagcatgcagcatcctcctccgcagcaggcgcccaaccagcggctgcagcatttcgacgcgcccccctacatgaacgtggccaagaggccgcgcttcgactttccgggcagcgcgggagtggaccgctgcgcttcgtggaacggcagcatgcacaacggcgctctggataatcacctctccccttccgcctacccaggcctacccggcgagttcacaccgcctgtgcccgacagcttcccttcggggccgcccctgcagcatccggccccggaccaccagtccctgcaacagcagcagcagcagcagcagcagcagcaacagcagcagcagcagcagcaacagcaacagcaacagcagcagcagcagcagcgccaaaacgcggccctcatgattaagcagatggcgtcgcggaatcagcagcagcggctgcgccagcccaacctggctcagctaggccaccccggggacgtgggccagggcggcctggtgcatggcggcccggtgggcggcttggcccagccgaactttgagcgcgaaggcggcagcacgggcgccgggcgtctgggcaccttcgagcagcaggcgccgcacttggcgcaagagagcgcgtggttctcaggtccgcatccgccgcccggagacctgctgccccgtaggatgggcggctcgggtctgcccgctgactgtggcccgcacgaccccagcctggcgccccctcctccgcctggtggctcgggggtgctgttccggggccctctgcaggagccgatgaggatgcccggagagggccacgtgcccgcgctgccttcaccgggcctgcagttcgggggcagtctgggaggcctgggtcagctgcagtcgcccggggcgggcgtggggctccccagcgctgcttcggagcgccggcccccgccgccggactttgctacgtctgcgctcgggggccagccgggctttccgtttggtgcagccggccggcagtccacgccgcacagcggtccaggcgtgaactcgccccccagcgcgggagggggcggtggcagctctggtggcggcggtggcgggggtgcctacccgccgcagcctgatttccagcccagccagcgcacctcggccagtaaattgggcgcgctctcgctgggctccttcaacaagcccagctccaaggacaacctgttcggccagagctgcctggctgcgctctccaccgcttgccagaacatgatcgccagcctcggggcccccaacctcaacgtgaccttcaacaagaagaacccgccagagggcaagaggaaactgagccagaacgagaccgacggcgcggcagtggccggcaacccgggctcggattacttcccaggagggactgctcctggggccccaggacccggaggcccgtccgggaccagtagcagcggctccaaagcctcggggccgcccaaccctccagcccagggggacggcaccagcctctcccccaactacaccctggaatccacgtcggggaatgacggcaagccggtctccgggggcggcggccggggacggggtcgcagaaaaagggacagtggtcacgtgagccctggcaccttctttgacaagtactcggcggctccggacagcgggggcgcacctggggtgagcccagggcagcagcaagcgtcaggcgcagccgtcgggggaagctccgcaggcgagacgcgcggggcaccgacgccccacgaaaaggcgctcacgtcgccatcctgggggaagggggctgagttgctcctgggggatcagccggacctcattgggtccctggacggcggggccaagtcggacagtagttcgccaaacgtgggtgagttcgcctcggacgaggtgagcacgagctacgccaatgaggacgaggtgtcgtccagctctgacaacccccaggcactagttaaagcgagcaggagtcccctggtgaccggctcgcccaaactccctccccgtggggtaggcgccggggaacacggaccgaaggcgcccccgcccgccctcggcctgggcatcatgtctaactctacctcgacccctgacagctacggcggcggtgggggcccgggccatccgggcactccgggcctggagcaggtccgcaccccgacgagcagcagcggcgccccgccacccgacgagatccaccccctggagatccttcaggcgcagatccagctacagaggcagcagttcagcatctccgaggaccagcctctggggctgaagggtggcaagaagggtgagtgcgccgtcggggcctcaggggcgcagaatggcgacagcgagctgggcagctgctgctccgaggcggtcaagagcgccatgagcaccattgacctggactcgctgatggcagagcacagcgctgcctggtacatgcccgctgacaaggccctggtggacagcgcggacgacgacaagacgttggcgccctgggagaaggccaaaccccagaaccccaacagcaaagaagcccacgacctccctgcaaacaaggcctcagcatcccagcctggcagccacttgcagtgcctgtctgtccactgcacagacgacgtgggtgacgccaaggctcgagcctccgtgcccacctggcggtccctgcattctgacatctccaacagatttgggacattcgtggctgccctaacttga

SEQ ID NO: 504 - DNA, 393 bp, Homo Sapiens
atgtctggacgtggtaagcaaggaggcaaagctcgcgccaaagcgaaatcccgctcttctcgcgctggtctccagttcccggtgggccgagtgcaccgcctgctccgtaaaggcaactacgcagagcgggttggggcaggcgcgccggtgtacctggcggcggtgttagagtacctgaccgccgagatcctggagctggccggcaacgcggctcgcgacaacaagaagactcgcatcatcccgcgccacttgcagctggccatccgcaacgacgaggagctcaacaaactgctaggccgggtgaccattgctcagggcggcgtccttcctaacatccaggccgtgcttctgcctaagaagaccgagagtcaccacaaggccaagggcaagtga

SEQ ID NO: 505 - DNA, 918 bp, Homo Sapiens
atgagcgcgctgctgcggctgctgcgcacgggtgccccagccgctgcgtgcctgcggttggggaccagtgcagggaccgggtcgcgccgtgctatggccctgtaccacactgaggagcgcggccagccctgctcgcagaattaccgcctcttctttaagaatgtaactggtcactacatttccccctttcatgatattcctctgaaggtgaactctaaagaggaaaatggcattcctatgaagaaagcacgaaatgatgaatatgagaatctgtttaatatgattgtagaaatacctcggtggacaaatgctaaaatggagattgccaccaaggagccaatgaatcccattaaacaatatgtaaaggatggaaagctacgctatgtggcgaatatcttcccttacaagggttatatatggaattatggtaccctccctcagattctttcttgtggagaagttattcatgtgaagatccttggaattttggctcttattgatgaaggtgaaacagattggaaattaattgctatcaatgcgaatgatcctgaagcctcaaagtttcatgatattgatgatgttaagaagttcaaaccgggttacctggaagctactcttaattggtttagattatataaggtaccagatggaaaaccagaaaaccagtttgcttttaatggagaattcaaaaacaaggcttttgctcttgaagttattaaatccactcatcaatgttggaaagcattgcttatgaagaagtgtaatggaggagctataaattgcacaaacgtgcagatatctgatagccctttccgttgcactcaagaggaagcaagatcattagttgaatcggtatcatcttcaccaaataaagaaagtaatgaagaagagcaagtgtggcacttccttggcaagtga

SEQ ID NO: 506 - DNA, 1728 bp, Homo Sapiens
atgccgcccggcaaagtgctgcagccggtcctgaagatgaaggtggacgagctgttcctgtactggctcagcgaggccagcacgcagcggatgctgcaggactgcctgcgccggatcaaggcgcccgggcgggaccagccgaccccgggggacggggagcagcccggggcctggcccacagccccgctcgccgccccccggcccagcgggctcgaacccccgggaacccccgggccgggccctgcgctgcccctgggcgccgcctccagccccaggaacgcgccccacgttcgaggcacccgtagatccgcagggacgagagtagttcagacacggaaagaagagcctctgcccccggccacgagccaaagcattccgaccttctacttccccagaggacgcccgcaggactccgtcaacgtggatgccgtcatcagcaagatcgagagcaccttcgcccggttcccccacgagagggccaccatggatgacatgggcctggtggccaaggcctgcggctgccccctctactggaaggggccgctcttctatggcgccggcggggagcgcacgggctccgtgtccgtccacaagttcgtcgccatgtggagaaaaatcctccagaactgccacgacgacgcggccaagttcgtccatctgctcatgagccccggctgcaactacctggtgcaggaggactttgtccccttcttgcaggacgtggtgaacacgcacccggggctgtcgttcctgaaggaggcgtccgagttccactcgcgctacatcaccacggtcatccagcggatcttctacgccgtgaaccggtcctggtccggcaggatcacctgcgccgagctgcggaggagctccttcctgcagaatgtggcgctgctggaggaggaggcggacatcaaccagctgaccgaattcttctcgtacgagcatttctacgtcatctactgcaagttctgggagctggacacggaccacgacctgctcatcgacgcggacgacctggcgcggcacaatgaccacgccctttctaccaagatgatagacaggatcttctcaggagcagtcacacgaggcagaaaagtgcagaaggaagggaagatcagctatgccgactttgtctggtttttgatctctgaggaagacaaaaaaacaccgaccagcatcgagtactggttccgctgcatggacctggacggggacggcgccctgtccatgttcgagctcgagtacttctacgaggagcagtgccgaaggctggacagcatggccatcgaggccctgcccttccaggactgcctctgccagatgctggacctggtcaagccgaggactgaagggaagatcacgctgcaggacctgaagcgctgcaagctggctaacgtcttcttcgacaccttcttcaacatcgagaagtacctcgaccacgagcagaaagagcagatctccctgctcagggacggtgacagcggcggccccgagctctcggactgggagaagtacgcggccgaggagtacgacatcctggtggccgaggagactgcgggagagccctgggaggacgggttcgaggccgagctcagccctgtggagcagaagctgagtgcgctgcgctccccgctggcccagaggcccttcttcgaggcgccctcaccgctgggcgccgtggacctgtacgagtacgcatgcggggacgaggacctggagccgctgtga

SEQ ID NO: 507 - DNA, 819 bp, Homo Sapiens
atgcggcgatcgaggagctctgcggccgccaagctgcgcgggcagaagcggtccggggcctccgcggcccccgcggcctccgcggccgctgccttggcacccagcgccacccgcacacggcgctccgctagccaggccgggagcaagagccaggcggtggagaagccgccgtcggagaagccgcggctgaggcgctcgtcgccgcgggcccaggaggagggcccgggggagccgccgccgcctgagctggcgttgctcccgccaccgccgccgccgccgccgactcccgcgaccccgacgtcctcggcgtccaacctggacctgggcgagcagcgggagcgctgggagacgttccagaagcggcagaagcttacctccgagggtgccgccaagctcctgctagacacctttgaataccagggcctggtgaagcacacaggaggctgccactgtggagcagttcgttttgaagtttgggcctcagcagacttgcatatatttgactgcaattgcagcatttgcaagaagaagcagaatagacacttcattgttccagcttctcgcttcaagctcctgaagggagctgagcacataacgacttacacgttcaatactcacaaagcccagcataccttctgtaagagatgtggcgttcagagcttctatactccacgatcaaaccccggaggcttcggaattgccccccactgcctggatgagggcactgtgcggagtatggtcactgaggaattcaatggcagcgattgggagaaggccatgaaagagcacaagaccatcaagaacatgtctaaagagtga

SEQ ID NO: 508 - DNA, 207 bp, Homo Sapiens
atgccgcagaaggatccgtgccagaagcaagcctgtgagatacagaaatgtttacaagccaacagctacatggaatcaaagtgtcaggctgtcatccaagaactgcgtaagtgttgtgctcagtatcccaagggaagatctgtcgtctgttcaggatttgaaaaagaagaggaagaaaacctaacacggaagtctgcatcaaagtaa

SEQ ID NO: 509 - DNA, 3114 bp, Homo Sapiens
atgtggcgctgcggcgggcggcagggcctgtgtgtgctgaggcggctgagcggcggacatgcacaccacagagcgtggcgatggaacagtaaccgggcttgtgagagggctctgcagtataaactaggagacaagatccatggattcaccgtaaaccaggtgacatctgttcccgagctgttcctgactgcagtgaagctcacccatgatgacacaggagccaggtatttacacctggccagagaagacacgaataatctgttcagcgtgcagttccgtactactcccatggacagtactggtgttcctcacattcttgagcataccgtcctttgtgggtctcagaaatatccgtgcagagaccctttcttcaaaatgttgaaccggtccctctccacgttcatgaacgccttcacagctagtgattatactctgtatccattttccacacaaaatcccaaggactttcagaatctcctctcggtgtatttggatgccacctttttcccatgtttacgcgagctggatttctggcaggaaggatggcggctggaacatgagaatccgagcgacccccagacgcccttggtctttaaaggagtcgtctttaatgagatgaagggagcgtttacagacaatgagaggatattctcccagcaccttcagaacagacttcttcctgaccacacgtactcagtggtctccgggggtgacccactgtgcatcccggagcttacatgggagcagcttaagcagtttcatgccactcactatcacccaagcaatgctaggttcttcacgtacggtaattttccattagaacagcatctgaaacaaattcacgaggaagcactgagcaaattccagaaaattgaaccaagcaccgtggtgccagctcagacaccctgggacaagcctagggaattccagataacatgtggcccggattcatttgctacagatccctctaaacaaacaaccatcagcgttagcttcctcttaccggacatcaccgacacatttgaagccttcacattaagtcttctgtcttcactcttgacttctgggcccaattctcccttttacaaagccttgattgaatctggccttggcacagacttttctcctgatgttggatataatggctacacgagggaggcctactttagtgtcggcctccaagggattgcggagaaagacattgagaccgtcagaagcctcatagacagaacgattgatgaagtagttgagaaaggatttgaagatgatcgaattgaggctttacttcataaaattgaaatacagatgaaacatcagtctaccagctttgggctgatgctgacatcatacatagcttcttgctggaaccatgatggggaccctgtggagctcttgaagttgggaaatcagttagctaaattcagacagtgcctgcaggaaaatccaaaatttttgcaagaaaaagtaaaacagtattttaagaataaccagcataagctgactttatcgatgaggccagatgacaagtatcacgagaagcaggcacaggtggaagccacgaagctcaagcagaaggtcgaggctctgtcccccggagacaggcagcagatctacgagaaaggtctagaattacggagtcaacaaagcaaacctcaagatgcctcttgtctgccagcgttgaaagtttccgatattgaacccaccatacctgtcacagagttggacgtggtcctgacagctggagatatccctgttcagtactgcgcccagcccaccaatggcatggtgtatttccgggccttctccagcctgaacacactccccgaggagctgaggccctatgtgcccctcttctgcagcgtcctcaccaagctgggctgcggccttcttgactaccgggagcaggctcagcagatagaattgaagaccggagggatgagtgcttctccccacgtgctccccgacgactcacacatggacacctacgagcagggtgtgcttttctcctctctctgcctggatcgaaacctgccagacatgatgcagctatggagtgaaatatttaacaacccgtgctttgaagaagaggagcacttcaaggtgctggtgaagatgaccgcccaggagctcgccaatggaattcctgactctgggcacctgtacgcatccatcagggcaggccggaccctcacgcccgcaggggacctgcaggagaccttcagcgggatggatcaggtgcggctgatgaagaggattgcagaaatgacagatatcaaacccatcctgaggaagctcccgcgtatcaagaaacacttgttaaatggtgataatatgaggtgttcagtgaatgcgactcctcagcagatgcctcagacagaaaaagcggtcgaagacttccttagaagcatcggtcggagtaaaaaggaacggaggcctgtgcgcccacacacggtcgagaaacctgtgcccagcagctctggtggagatgcccacgttccccatggctcccaggtcattaggaagctggtcatggaacccaccttcaagccctggcagatgaagactcacttcctgatgcccttcccggtgaattacgtgggtgaatgcatccgaactgtcccctacacggacccagatcatgccagtcttaaaatccttgcacgtttgatgactgccaaattcttgcatacagaaattcgagaaaaaggcggtgcttatggtggaggcgcaaaactcagccacaatgggattttcaccctttactcttacagggacccaaatacaatagagacgctccagtcttttgggaaggctgtcgactgggctaagtctggaaaattcacacagcaagacatcgacgaagccaaactttctgtcttctcaaccgtagatgctcctgtcgctccttcagacaaaggaatggaccacttcttgtacggcctctcggatgagatgaagcaggcccacagagagcagctctttgctgtcagccacgacaagctcctggccgtgagcgatagatacctcggcactgggaagagcacacacggcctggccatcctcggacccgagaacccgaaaattgccaaggacccatcctggatcatccaatga

SEQ ID NO: 510 - DNA, 1614 bp, Homo Sapiens
atgctcaataccctgcagaccaatgccggctacctggagcaggtgaagcgccagcggggtgaccctcagacacagttggaagccatggaactgtacctggcacggagtgggctgcaggtggaggacttggaccggctgaacatcatccacgtcactgggacgaaggggaagggctccacctgtgccttcacggaatgtatcctccgaagctatggcctgaagacgggattctttagctctccccacctggtgcaggttcgggagcggatccgcatcaatgggcagcccatcagtcctgagctcttcaccaagtacttctggcgcctctaccaccggctggaggagaccaaggatggcagctgtgtctccatgcccccctacttccgcttcctgacactcatggccttccacgtcttcctccaagagaaggtggacctggcagtggtggaggtgggcattggcggggcttatgactgcaccaacatcatcaggaagcctgtggtgtgcggagtctcctctcttggcatcgaccacaccagcctcctgggggatacggtggagaagatcgcatggcagaaagggggcatctttaagcaaggtgtccctgccttcactgtgctccaacctgaaggtcccctggcagtgctgagggaccgagcccagcagatctcatgtcctctatacctgtgtccgatgctggaggccctcgaggaaggggggccgccgctgaccctgggcctggagggggagcaccagcggtccaacgccgccttggccttgcagctggcccactgctggctgcagcggcaggaccgccatggtgctggggagccaaaggcatccaggccagggctcctgtggcagctgcccctggcacctgtgttccagcccacatcccacatgcggctcgggcttcggaacacggagtggccgggccggacgcaggtgctgcggcgcgggcccctcacctggtacctggacggtgcgcacaccgccagcagcgcgcaggcctgcgtgcgctggttccgccaggcgctgcagggccgcgagaggccgagcggtggccccgaggttcgagtcttgctcttcaatgctaccggggaccgggacccggcggccctgctgaagctgctgcagccctgccagtttgactatgccgtcttctgccctaacctgacagaggtgtcatccacaggcaacgcagaccaacagaacttcacagtgacactggaccaggtcctgctccgctgcctggaacaccagcagcactggaaccacctggacgaagagcaggccagcccggacctctggagtgcccccagcccagagcccggtgggtccgcatccctgcttctggcgccccacccaccccacacctgcagtgccagctccctcgtcttcagctgcatttcacatgccttgcaatggatcagccaaggccgagaccccatcttccagccacctagtcccccaaagggcctcctcacccaccctgtggctcacagtggggccagcatactccgtgaggctgctgccatccatgtgctagtcactggcagcctgcacctggtgggtggtgtcctgaagctgctggagcccgcactgtcccagtag

SEQ ID NO: 511 - DNA, 450 bp, Homo Sapiens
atgaaagtcgccagtggcagcaccgccaccgccgccgcgggccccagctgcgcgctgaaggccggcaagacagcgagcggtgcgggcgaggtggtgcgctgtctgtctgagcagagcgtggccatctcgcgctgcgccgggggcgccggggcgcgcctgcctgccctgctggacgagcagcaggtaaacgtgctgctctacgacatgaacggctgttactcacgcctcaaggagctggtgcccaccctgccccagaaccgcaaggtgagcaaggtggagattctccagcacgtcatcgactacatcagggaccttcagttggagctgaactcggaatccgaagttggaacccccgggggccgagggctgccggtccgggctccgctcagcaccctcaacggcgagatcagcgccctgacggccgaggtgagatccagatccgaccactag

SEQ ID NO: 512 - DNA, 1143 bp, Homo Sapiens
atgggcgccgcagccgctgaggcgccgctccggctgcctgccgcgcctccgctcgccttctgctgctacacgtcggtgcttctgctcttcgccttctctctgcccgggagccgcgcgtccaaccagcccccgggtggtggcggcggcagcggcggggactgtcccggcggcaaaggcaagagcatcaactgctcagaattaaatgtgagggagtctgacgtaagagtttgtgatgagtcatcatgtaaatatggaggagtctgtaaagaagatggagatggtttgaaatgtgcatgccaatttcagtgccatacaaattatattcctgtctgtggatcaaatggggacacttatcaaaatgaatgctttctcagaagggctgcttgtaagcaccagaaagagataacagtaatagcaagaggaccatgctactctgataatggatctggatctggagaaggagaagaggaagggtcaggggcagaagttcacagaaaacactccaagtgtggaccctgcaaatataaagctgagtgtgatgaagatgcagaaaatgttgggtgtgtatgtaatatagattgcagtggatacagttttaatcctgtgtgtgcttctgatgggagttcctataacaatccctgttttgttcgagaagcatcttgtataaagcaagaacaaattgatataaggcatcttggtcattgcacagatacagatgacactagtttgttgggaaagaaagatgatggactacaatatcgaccagatgtgaaagatgctagtgatcaaagagaagatgtttatattggaaaccacatgccttgccctgaaaacctcaatggttactgcatccatggaaaatgtgaattcatctattctactcagaaggcttcttgtagatgtgaatctggctacactggacagcactgtgaaaagacagactttagtattctctatgtagtgccaagtaggcaaaagctcactcatgttcttattgcagcaattattggagctgtacagattgccatcatagtagcaattgtaatgtgcataacaagaaaatgccccaaaaacaatagaggacgtcgacagaagcaaaacctaggtcattttacttcagatacgtcatccagaatggtttaa

SEQ ID NO: 513 - DNA, 3279 bp, Homo Sapiens
atgccctgtggcttcagtccgtctcctgttgcccaccacctcgtccctgggccgcctgataccccagcccaacagctaaggtgtggatggacagtagggggctggcttctctcactggtcaggggtcttctcccctgtctgcctcccggagctaggactgcagaggggcctatcatggtgcttgcaggccccctggctgtctcgctgttgctgcccagcctcacactgctggtgtcccacctctccagctcccaggatgtctccagtgagcccagcagtgagcagcagctgtgcgcccttagcaagcaccccaccgtggcctttgaagacctgcagccgtgggtctctaacttcacctaccctggagcccgggatttctcccagctggctttggacccctccgggaaccagctcatcgtgggagccaggaactacctcttcagactcagccttgccaatgtctctcttcttcaggccacagagtgggcctccagtgaggacacgcgccgctcctgccaaagcaaagggaagactgaggaggagtgtcagaactacgtgcgagtcctgatcgtcgccggccggaaggtgttcatgtgtggaaccaatgccttttcccccatgtgcaccagcagacaggtggggaacctcagccggactattgagaagatcaatggtgtggcccgctgcccctatgacccacgccacaactccacagctgtcatctcctcccagggggagctctatgcagccacggtcatcgacttctcaggtcgggaccctgccatctaccgcagcctgggcagtgggccaccgcttcgcactgcccaatataactccaagtggcttaatgagccaaacttcgtggcagcctatgatattgggctgtttgcatacttcttcctgcgggagaacgcagtggagcacgactgtggacgcaccgtgtactctcgcgtggcccgcgtgtgcaagaatgacgtggggggccgattcctgctggaggacacatggaccacattcatgaaggcccggctcaactgctcccgcccgggcgaggtccccttctactataacgagctgcagagtgccttccacttgccggagcaggacctcatctatggagttttcacaaccaacgtaaacagcatcgcggcttctgctgtctgcgccttcaacctcagtgctatctcccaggctttcaatggcccatttcgctaccaggagaaccccagggctgcctggctccccatagccaaccccatccccaatttccagtgtggcaccctgcctgagaccggtcccaacgagaacctgacggagcgcagcctgcaggacgcgcagcgcctcttcctgatgagcgaggccgtgcagccggtgacacccgagccctgtgtcacccaggacagcgtgcgcttctcacacctcgtggtggacctggtgcaggctaaagacacgctctaccatgtactctacattggcaccgagtcgggcaccatcctgaaggcgctgtccacggcgagccgcagcctccacggctgctacctggaggagctgcacgtgctgccccccgggcgccgcgagcccctgcgcagcctgcgcatcctgcacagcgcccgcgcgctcttcgtggggctgagagacggcgtcctgcgggtcccactggagaggtgcgccgcctaccgcagccagggggcatgcctgggggcccgggacccgtactgtggctgggacgggaagcagcaacgttgcagcacactcgaggacagctccaacatgagcctctggacccagaacatcaccgcctgtcctgtgcggaatgtgacacgggatgggggcttcggcccatggtcaccatggcaaccatgtgagcacttggatggggacaactcaggctcttgcctgtgtcgagctcgatcctgtgattcccctcgaccccgctgtgggggccttgactgcctggggccagccatccacatcgccaactgctccaggaatggggcgtggaccccgtggtcatcgtgggcgctgtgcagcacgtcctgtggcatcggcttccaggtccgccagcgaagttgcagcaaccctgctccccgccacgggggccgcatcttcgtgggcaagagccgggaggaacggttctgtaatgagaacacgccttgcccggtgcccatcttctgggcttcctggggctcctggagcaagtgcagcagcaactgtggagggggcatgcagtcgcggcgtcgggcctgcgagaacggcaactcctgcctgggctgcggcgagttcaagacgtgcaaccccgagggctgccccgaagtgcggcgcaacaccccctggacgccgtggctgcccgtgaacgtgacgcagggcggggcacggcaggagcagcggttccgcttcacctgccgcgcgccccttgcagacccgcacggcctgcagttcggcaggagaaggaccgagacgaggacctgtcccgcggacggctccggctcctgcgacaccgacgccctggtggaggtcctcctgcgcagcgggagcacctccccgcacacggtgagcgggggctgggccgcctggggcccgtggtcgtcctgctcccgggactgcgagctgggcttccgcgtccgcaagagaacgtgcactaacccggagccccgcaacgggggcctgccctgcgtgggcgatgctgccgagtaccaggactgcaacccccaggcttgcccagttcggggtgcttggtcctgctggacctcatggtctccatgctcagcttcctgtggtgggggtcactatcaacgcacccgttcctgcaccagccccgcaccctccccaggtgaggacatctgtctcgggctgcacacggaggaggcactatgtgccacacaggcctgcccaggctggtcgccctggtctgagtggagtaagtgcactgacgacggagcccagagccgaagccggcactgtgaggagctcctcccagggtccagcgcctgtgctggaaacagcagccagagccgcccctgcccctacagcgagattcccgtcatcctgccagcctccagcatggaggaggccaccgactgtgcaggtaaaagaaaccggacctacctcatgctgcggtcctcccagccctccagcaccccactccaaagtctggactctttccacatcctgctccagacagccaagctttgttggggtccccactgctttgagatgggttcaatctcatccacttggtggccacgggcatctcctgcttcttgggctctgggctcctga

SEQ ID NO: 514 - DNA, 897 bp, Homo Sapiens
atggcgaggaggagccgccaccgcctcctcctgctgctgctgcgctacctggtggtcgccctgggctatcataaggcctatgggttttctgccccaaaagaccaacaagtagtcacagcagtagagtaccaagaggctattttagcctgcaaaaccccaaagaagactgtttcctccagattagagtggaagaaactgggtcggagtgtctcctttgtctactatcaacagactcttcaaggtgattttaaaaatcgagctgagatgatagatttcaatatccggatcaaaaatgtgacaagaagtgatgcggggaaatatcgttgtgaagttagtgccccatctgagcaaggccaaaacctggaagaggatacagtcactctggaagtattagtggctccagcagttccatcatgtgaagtaccctcttctgctctgagtggaactgtggtagagctacgatgtcaagacaaagaagggaatccagctcctgaatacacatggtttaaggatggcatccgtttgctagaaaatcccagacttggctcccaaagcaccaacagctcatacacaatgaatacaaaaactggaactctgcaatttaatactgtttccaaactggacactggagaatattcctgtgaagcccgcaattctgttggatatcgcaggtgtcctgggaaacgaatgcaagtagatgatctcaacataagtggcatcatagcagccgtagtagttgtggccttagtgatttccgtttgtggccttggtgtatgctatgctcagaggaaaggctacttttcaaaagaaacctccttccagaagagtaattcttcatctaaagccacgacaatgagtgaaaatgatttcaagcacacaaaatcctttataatttaa

SEQ ID NO: 515 - DNA, 1146 bp, Homo Sapiens
atggctgcgttcggccgtcaggtccttgattggcaccgcctgatccccctcacctgggcctgtatggctaggcagactcctcatcttggagaacagagaaggacgacagcttctttgttgcgcaaactgactacagcctccaatggaggggtcattgaggagttatcttgtgttagatccaataactatgtgcaggaaccagagtgcaggaggaatcttgttcagtgcctccttgagaagcaggggactcctgtggtacaagggtccttggagctagagagggtcatgagttccctcctggacatgggtttcagcaatgcccatattaatgaattgctcagtgtacggcgaggtgccagtcttcaacagttgctggacatcatttcagaatttattctcttgggtctgaatccagagcctgtgtgtgtggtcttgaagaaaagtccccagttattgaaactgcctattatgcaaatgaggaagcgctccagttacctgcaaaagcttgggcttggagaagggaaattaaagagggtgctttactgttgccctgaaattttcaccatgcgccagcaggacattaacgacactgtcaggcttctcaaggagaagtgccttttcacggtacagcaagtcaccaagattttgcacagttgcccctctgttcttcgagaggacctgggtcaactggaatacaagtttcagtatgcatacttcaggatgggaattaagcatccagacattgtaaagagtgagtacttgcagtattcactaaccaagattaagcagagacacatttacctggagcgcctgggacggtaccaaacccctgataagaaggggcagacacagatccctaacccattgctcaaggacattctcagagtttcagaagctgagtttttggccaggacagcctgtacttctgttgaggagtttcaagtttttaagaagctcctggctcgggaggaggaggagtctgagagcagcacatctgatgacaaaagggcaagtctggatgaggatgaggatgacgatgatgaggaggacaatgatgaggatgacaatgatgaggatgacgatgatgaggacgacgacgaggcggaggacaatgatgaggatgaggacgacgacgaggaggaatag

SEQ ID NO: 516 - DNA, 1146 bp, Homo Sapiens; identical to SEQ ID NO: 515

SEQ ID NO: 517 - DNA, 687 bp, Homo Sapiens
atggcctggaaatccggcggcgccagccactcggagctaatccacaatctccgcaaaaatggaatcatcaagacagataaagtatttgaagtgatgctggctacagaccgctcccactatgcaaaatgtaacccatacatggattctccacaatcaataggtttccaagcaacaatcagtgctccacacatgcatgcatatgcgctagaacttctatttgatcagttgcatgaaggagctaaagctcttgatgtaggatctggaagtggaatccttactgcatgttttgcacgtatggttggatgtactggaaaagtcataggaattgatcacattaaagagctagtagatgactcagtaaataatgtcaggaaggacgatccaacacttctgtcttcagggagagtacagcttgttgtgggggatggaagaatgggatatgctgaagaagccccttatgatgccattcatgtgggagctgcagcccctgttgtaccccaggcgctaatagatcagttaaagcccggaggaagattgatattgcctgttggtcctgcaggcggaaaccaaatgttggagcagtatgacaagctacaagatggcagcatcaaaatgaagcctctgatgggggtgatatacgtgcctttaacagataaagaaaagcagtggtccagggatgaattgtaa

SEQ ID NO: 518 - DNA, 4110 bp, Homo Sapiens
atgggcggcaagaacaagaaacacaaggctccagcggccgcggtggtccgggccgccgtgtctgcttccagagccaaatctgccgaggctggaattgccggggaggcccaaagcaagaagccagtgtccaggccggccaccgctgccgctgccgctgccggctccagggagccccgtgtcaagcaaggtccaaaaatttatagttttaattctacaaatgattctagtggtcctgcaaatctggataaatctattttgaaagtggtaattaataacaaactagagcaaagaattattggagtgatcaatgagcataaaaagcaaaataatgacaaaggaatgatttctggaagacttactgccaaaaaattgcaggatttatacatggctttacaagcattttcatttaagacaaaggacattgaagatgccatgaccaatacactcttatatggaggtgaccttcattctgccttggattggctctgtttaaacctttcagatgatgcacttcctgaaggattcagtcaggaatttgaagagcagcaacctaaaagtaggcctaaatttcagtctcctcaaatacaagccactatttcacctccattgcaacctaaaacaaaaacatatgaagaggaccctaagagtaagccaaaaaaggaagaaaaaaatatggaagtaaatatgaaagagtggattttacgatatgctgaacaacaaaatgaagaagaaaagaatgagaattctaaaagtttagaagaggaggaaaaatttgaccctaatgaaaggtacttacatcttgcagcaaaactgctggatgcaaaagaacaagcagctacctttaaactagaaaaaaacaagcaaggccaaaaagaggctcaggaaaaaataaggaaatttcaaagagaaatggaaactttagaagaccatccagtatttaacccagccatgaagatttcacatcaacaaaatgaaaggaaaaagcctcctgtagccacagaaggagaaagtgcattgaattttaatttatttgaaaaatctgcagctgctactgaagaagagaaagataaaaagaaagaacctcatgatgtaagaaattttgactatactgctcgaagttggactggaaaatctcccaaacaatttctgattgattgggtcaggaagaatcttcccaagagtccaaatccttcctttgaaaaagttccagtaggtagatactggaaatgtagggttagggtaatcaagtctgaagatgatgtcctggtagtatgccctacaatcttaacagaagatggcatgcaagctcagcacctgggagctactttagccctttaccgtttagttaaagggcagtcagttcatcagttacttcctcccacttaccgagatgtttggctggagtggagtgatgcagaaaagaaaagggaagaattaaataaaatggaaaccaataaaccacgtgatctttttattgccaaacttctgaataaactgaaacagcagcaacagcagcaacaacagcattctgaaaataagagagaaaactctgaagatcccgaggaatcttgggaaaatttagtttcggatgaggatttttctgcactgtccttggaatcagcaaatgtggaagatttggaacctgttagaaacctctttagaaagttgcaaagcacacctaagtatcagaaacttctaaaggaaagacaacagctacctgtatttaaacatcgggactcaattgttgaaactcttaaaaggcatcgggtagtggttgtggcaggtgaaacagggagtggtaaaagtactcaggtaccacattttctattggaagatttgcttctaaatgagtgggaagcaagtaaatgtaacattgtctgtacccaaccccgaagaatctcagcagttagtttagccaacagagtatgtgatgaattgggctgtgaaaatggacctggaggaaggaattccttgtgtggatatcagatccggatggaatctcgagcttgtgaatctaccaggttactctattgtacaacaggggttttgctaaggaaacttcaagaagatggtcttctaagtaatgtgtctcatgttattgtagatgaggttcatgaaagaagtgtccagtcagacttcctactaattatcttgaaggaaattttacagaaacgttctgatctacacttgattctaatgagtgccactgtggacagcgaaaaattttctacatatttcacacactgccccattctcagaatttcaggaagaagttatcctgttgaggtttttcatcttgaagatataatagaagaaacaggctttgtactggaaaaagactcagaatattgtcagaaatttctggaagaggaagaagaagtaaccattaatgttacaagcaaagcagggggaataaaaaaatatcaggaatacatcccagttcagactggagcacatgctgatttaaatccattttaccaaaagtacagcagccgcactcagcatgctattctatacatgaatcctcataaaatcaacctggatctcattttggaacttcttgcatacttagataaaagtccccaattcagaaatattgaaggagcagtattgatctttttaccaggacttgctcatattcagcagttgtatgatcttctatcaaatgatagaagattttattctgaacgatataaagtgatagctctgcattctattctttcaacccaagatcaagctgcagcattcacacttccccctccaggagtcaggaagattgttttagcaaccaatattgcagagacgggtatcactattcctgatgttgtatttgtaattgatactggaagaacaaaagaaaataagtaccatgaaagcagtcagatgagttctttggtggagacgtttgtcagtaaagccagtgctttgcagcgccagggaagagctgggcgggtcagagatggcttctgtttccgaatgtacacaagagaaagatttgaaggctttatggattattctgttcctgaaatcttacgtgtacctttggaggaattatgccttcatattatgaaatgtaatcttggttctcctgaagatttcctctccaaagccttagatcctcctcagctccaagtgatcagcaatgcaatgaatttgctccgaaaaattggagcttgtgaattaaatgagcctaaactgactccgttgggccaacaccttgcagctttacctgtgaatgtcaagattggcaagatgcttatttttggtgccatatttggctgccttgacccagtggcaacactagctgcagttatgacagagaagtctccttttaccacaccaattggtcgaaaagatgaagcagatcttgcaaaatcagctttggccatggcggattcagaccacctgacgatctacaatgcatatctaggatggaagaaagcacgacaagaaggaggttatcgttctgaaatcacatactgccggaggaactttcttaatagaacatcactgttaaccctagaggatgtaaagcaggagttaataaagttggttaaggcagcaggattttcatcttccacaacttctaccagctgggaaggaaacagagcctcacagaccctctcattccaagaaattgcccttcttaaagctgtactggtggctggactgtatgacaatgtggggaagataatctatacaaagtcagtggatgttacagaaaaattggcttgcattgtggagacggcccaaggcaaagcacaagtacacccatcctcagtaaatcgagatttgcaaactcatggatggctcttataccaggagaagataaggtatgccagagtgtatttgagagaaactaccctaataaccccttttccagttttactttttggtggtgatatagaagttcagcaccgagaacgtcttctttctattgatggctggatctattttcaggcccctgtaaagatagctgtcattttcaagcagctgagagttctcattgattcagttttaagaaaaaagcttgaaaatccaaagatgtcccttgaaaatgacaagattctgcagatcattacggaattgataaaaacagagaataactga

SEQ ID NO: 519 - DNA, 2382 bp, Homo Sapiens
atggaggccagagtggagcgtgctgtgcagaaaaggcaagtcttatttctttgtgtatttctgggaatgtcttgggctggcgccgaaccgcttcggtattttgtggcggaggaaaccgagagaggcacctttcttaccaacttggcaaaagacctagggttaggggtaggggaactgagagcccggggaactagaattgtttcagaccagaacatgcaaattttactgctcagttcgcttactggtgatctacttctaaatgagaaattggaccgagaggaactgtgtggccccagagagccctgtgtgctgcctttccagttgttattggaaaaaccttttcagattttccgtgctgaactatgggtcagagacatcaatgatcacgctccagtatttctagacagagagatttccttgaaaatattagaaagtaccactccaggggcggcatttctcctagagagtgcacaggattcagatgttggaaccaacagcctgagtaactacaccatcagccccaatgcctatttccatattaatgtccatgatagcggggaggggaatatctatcccgaattggtgctgaatcaagtgctggatcgggaagagataccagagttcagtttaaccctcaccgctttagacggcggctctcctccaagatcagggaccgccctcgtgcgcattctggttctagacgtaaatgacaacgcccctgattttgtgcggtcgctctacaaggtgcaggtgcccgaaaatagccccgttggttccatggttgtctccgtgtcagccagagatttagataccggaagtaatggggaaatagcctatgcattttcttacgccactgaaagaattctcaaaacgtttcaaatcaatccaacatctggcagtcttcatcttaaagcgcaattggactatgaggcaattcaaacttacacattaactattcaggccaaagacggcggcgggctttctggaaaatgcactgtagtggttgatgtaacagatataaacgataatcgacccgagctgctcctgtcttcacttactagcccaattgcagaaaactcacccgagacagtcgtggctgtttttaggattagagacagagattccgggaacaatggaaagacagtgtgctccatccaggacgatgtccccttcatcctgaagccatctgtcgaaaacttctatactctggtaacagagaaacctttggatcgagagaggaacactgagtacaacatcaccatcaccgtcaccgacttggggacacccaggctgaaaaccgagcacaacataaccgtgctggtctccgacgtcaatgacaacgctcccgccttcacccaaacctcctacaccctgtttgtccgtgagaacaacagccccgccctgcccatcggcagtgtcagcgccacagacagagactcgggcaccaacgcccaggtcatctactccctgctgccgtcccaggacccgcacctgcccctcgcctccctggtctccatcaacgcggacaacggccacctgtttgccctcaggtccctggactacgaggccctgcaggcgttcgagttccgcgtgggcgccacagaccgcggctcccccgcgctgagcagcgaggcgctggtgcgcgtgctggtgctggacgccaacgacaactcgcccttcgtgctgtacccgctgcagaacagctccgcgccctgcaccgagccgttgccccgggcggccgagccgggctacctggtgaccaaggtggtggcggtggacggcgactcgggccagaacgcctggctgtcgtaccagctgctcaaggccacggagcccgggctattcggcgtgtgggcgcacaatggcgaggtgcgtaccgccaggctgctgagcgagcgcgacgcagccaagcagaggctggtggtgctggtcaaggacaatggcgagcctccgcgctcggccaccgccacgctgcacgtgctcctggtggacggcttctcccagccctacctgcggctcccggaggcggccccggaccaggccaactcgctcaccgtctacctggtggtggcgttggcctcggtgtcttcgctcttcctcctctcggtgctcctgttcgtggcggtgcggctgtgcaggaggagcagggcggccccggtgggtcgctgctcggtgcctgagggcccctttccacgacatctggtggacttgagcggcaccgggaccctatcccagagctaccagtatgaggtgtgcctgactggaggctccgggacaaatgagttcaagtttctgaaaccaattatccccaacctgctaccccagagcacaggcagggaagtggaagaaaatcgcccatttcagaataatttgggtttctga

SEQ ID NO: 520 - DNA, 1887 bp, Homo Sapiens
atggggagctgcgcgcggctgctgctgctctggggctgcacggtggtggccgcaggactgagtggagtagctggagtgagttcccgctgtgaaaaagcctgcaaccctcggatgggaaatttggctttggggcgaaaactctgggcagacaccacctgcggtcagaatgctaccgaactgtactgcttctacagtgagaacacggatctgacttgtcggcagcccaaatgtgacaagtgcaatgctgcctatcctcacctggctcacctgccatctgccatggcagactcatccttccggtttcctcgcacatggtggcagtctgcggaggatgtgcacagagaaaagatccagttagacctggaagctgaattctacttcactcacctaattgtgatgttcaagtcccccaggccggctgccatggtgctggaccgctcccaggactttgggaaaacatggaagccttataagtactttgcgactaactgctccgctacatttggcctggaagatgatgttgtcaagaagggcgctatttgtacttctaaatactccagtccttttccatgcactggaggagaggttattttcaaagctttgtcaccaccatacgatacagagaacccttacagtgccaaagttcaggagcagctgaagatcaccaaccttcgcgtgcagctgctgaaacgacagtcttgtccctgtcagagaaatgacctgaacgaagagcctcaacattttacacactatgcaatctatgatttcattgtcaagggcagctgcttctgcaatggccacgctgatcaatgcatacctgttcatggcttcagacctgtcaaggccccaggaacattccacatggtccatgggaagtgtatgtgtaagcacaacacagcaggcagccactgccagcactgtgccccgttatacaatgaccggccatgggaggcagctgatggcaaaacgggggctcccaacgagtgcagaacctgcaagtgtaatgggcatgctgatacctgtcacttcgacgttaatgtgtgggaggcatcagggaatcgtagtggtggtgtctgtgatgactgtcagcacaacacagaaggacagtattgccagaggtgcaagccaggcttctatcgtgacctgcggagacccttctcagctccagatgcttgcaaaccgtgttcctgccatccagtaggatcagctgtccttcctgccaactcagtgaccttctgcgaccccagcaatggtgactgcccttgcaagcctggggtggcagggcgacgttgtgacaggtgcatggtgggatactggggcttcggagactatggctgtcgaccatgtgactgtgcggggagctgtgaccctatcaccggagactgcatcagcagccacacagacatagactggtatcatgaagttcctgacttccgtcccgtgcacaataagagcgaaccagcctgggagtgggaggatgcgcaggggttttctgcacttctacactcaggtaaatgcgaatgtaaggaacagacattaggaaatgccaaggcattctgtggaatgaaatattcatatgtgctaaaaataaagattttatcagctcatgataaaggtactcatgttgaggtcaatgtgaagattaaaaaggtcttaaaatctaccaaactgaagattttccgaggaaagcgaacattatatccagaatcatggacggacagaggatgcacttgtccaatcctcaatcctggtttggaataccttgtagcaggacatgaggatataagaacaggcaaactaattgtgaatatgaaaagctttgtccagcactggaaaccttctcttggaagaaaagtcatggatattttaaaaagagagtgcaagtag

SEQ ID NO: 521 - DNA, 2067 bp, Homo Sapiens
atgtggtgcattgtcctgttttcacttttggcatgggtttatgctgagcctaccatgtatggggagatcctgtcccctaactatcctcaggcatatcccagtgaggtagagaaatcttgggacatagaagttcctgaagggtatgggattcacctctacttcacccatctggacattgagctgtcagagaactgtgcgtatgactcagtgcagataatctcaggagacactgaagaagggaggctctgtggacagaggagcagtaacaatccccactctccaattgtggaagagttccaagtcccatacaacaaactccaggtgatctttaagtcagacttttccaatgaagagcgttttacggggtttgctgcatactatgttgccacagacataaatgaatgcacagattttgtagatgtcccttgtagccacttctgcaacaatttcattggtggttacttctgctcctgccccccggaatatttcctccatgatgacatgaagaattgcggagttaattgcagtggggatgtattcactgcactgattggggagattgcaagtcccaattatcccaaaccatatccagagaactcaaggtgtgaataccagatccggttggagaaagggttccaagtggtggtgaccttgcggagagaagattttgatgtggaagcagctgactcagcgggaaactgccttgacagtttagtttttgttgcaggagatcggcaatttggtccttactgtggtcatggattccctgggcctctaaatattgaaaccaagagtaatgctcttgatatcatcttccaaactgatctaacagggcaaaaaaagggctggaaacttcgctatcatggagatccaatgccctgccctaaggaagacactcccaattctgtttgggagcctgcgaaggcaaaatatgtctttagagatgtggtgcagataacctgtctggatgggtttgaagttgtggagggacgtgttggtgcaacatctttctattcgacttgtcaaagcaatggaaagtggagtaattccaaactgaaatgtcaacctgtggactgtggcattcctgaatccattgagaatggtaaagttgaagacccagagagcactttgtttggttctgtcatccgctacacttgtgaggagccatattactacatggaaaatggaggaggtggggagtatcactgtgctggtaacgggagctgggtgaatgaggtgctgggcccggagctgccgaaatgtgttccagtctgtggagtccccagagaaccctttgaagaaaaacagaggataattggaggatccgatgcagatattaaaaacttcccctggcaagtcttctttgacaacccatgggctggtggagcgctcattaatgagtactgggtgctgacggctgctcatgttgtggagggaaacagggagccaacaatgtatgttgggtccacctcagtgcagacctcacggctggcaaaatccaagatgctcactcctgagcatgtgtttattcatccgggatggaagctgctggaagtcccagaaggacgaaccaattttgataatgacattgcactggtgcggctgaaagacccagtgaaaatgggacccaccgtctctcccatctgcctaccaggcacctcttccgactacaacctcatggatggggacctgggactgatctcaggctggggccgaacagagaagagagatcgtgctgttcgcctcaaggcggcaaggttacctgtagctcctttaagaaaatgcaaagaagtgaaagtggagaaacccacagcagatgcagaggcctatgttttcactcctaacatgatctgtgctggaggagagaagggcatggatagctgtaaaggggacagtggtggggcctttgctgtacaggatcccaatgacaagaccaaattctacgcagctggcctggtgtcctgggggccccagtgtgggacctatgggctctacacacgggtaaagaactatgttgactggataatgaagactatgcaggaaaatagcaccccccgtgaggactaa

SEQ ID NO: 522 - DNA, 1293 bp, Homo Sapiens
atggccacgctgagcgtcaagccaagtcggcgcttccagctgcccgactggcacactaacagctacctgctatccaccaatgcccagctgcagcgagatgcttcccatcagatccgccaggaggcccgggtgctccgcaacgagaccaacaaccagaccatttgggatgaacatgacaacaggactcgactggtggagaggattgatactgtcaaccggtggaaggagatgctggacaagtgtctgacagatttagatgccgagatcgatgccctgacacagatgaaggagtcagcagagcaaaacctgcaggccaagaacctgcctctggatgtggccattgagtgcctgaccctgcgggaaagccggcgagacattgatgtggtgaaggaccctgtggaggatgagctgcataaagaggtggaggtcatcgaggccaccaagaaggccttgcaacagaaggtcagccaggccttcgagcagctctgcctcttgcaggaagtccaacagcagctcaactccgaccatcggggcaaaatggagacactagagatcgacagaggctgtctctctctcaacctcagatccccaaacatctcgctgaaggttgaccccacacgtgtacctgatggctccaccacactccagcagtgggatgacttcagtcggttcaacaaggaccgagcggaggctgagatgaaggcagccacagagctgagggaggccactgctctaactattgctgagaccaacaacgagcttgaagcccagagagttgcaacggaatttgccttcaggaagcggctgcgggagatggagaaagtgtacagtgagctcaagtggcaagagaagaataccttggaggagatcgctgagctgcaggaggacatccggcacctggaggaggatctgcgcacaaagctcctgagcctgaagctgtcccatacccggctagaggccagaacctaccggcccaacgtggaactctgccgggaccaggcacagtacggcctcaccgacgaggttcaccagctagaggcaaccatcgctgccctgaagcagaagctggcgcaagcacaggacgcactggacgccctgtgcaagcacctggcccggctgcaggctgacattgcctgcaaggccaactccatgctgctggacaccaagtgcatggacacacggcgcaagctgaccgtgcctgctgagaggttcgtgcctgaggtggacaccttcacacgtaccacaaatagcaccctgagtccactcaaaagctgccagctggagctggcctag

SEQ ID NO: 523 - DNA, 1980 bp, Homo Sapiens
atgaagaaagacgtgcggatcctgctggtgggagaacctagagttgggaagacatcactgattatgtctctggtcagtgaagaatttccagaagaggttcctccccgggcagaagaaatcaccattccagctgatgtcaccccagagagagttccaacacacattgtagattactcagaagcagaacagagtgatgaacaacttcatcaagaaatatctcaggctaatgtcatctgtatagtgtatgccgttaacaacaagcattctattgataaggtaacaagtcgatggattcctctcataaatgaaagaacagacaaagacagcaggctgcctttaatattggttgggaacaaatctgatctggtggaatatagtagtatggagaccatccttcctattatgaaccagtatacagaaatagaaacctgtgtggagtgttcagcgaaaaacctgaagaacatatcagagctcttttattacgcacagaaagctgttcttcatcctacagggcccctgtactgcccagaggagaaggagatgaaaccagcttgtataaaagcccttactcgtatatttaaaatatctgatcaagataatgatggtactctcaatgatgctgaactcaacttctttcagaggatttgtttcaacactccattagctcctcaagctctggaggatgtcaagaatgtagtcagaaaacatataagtgatggtgtggctgacagtgggttgaccctgaaaggttttctctttttacacacactttttatccagagagggagacacgaaactacttggactgtgcttcgacgatttggttatgatgatgacctggatttgacacctgaatatttgttccccctgctgaaaatacctcctgattgcactactgaattaaatcatcatgcatatttatttctccaaagcacctttgacaagcatgatttggatagagactgtgctttgtcacctgatgagcttaaagatttatttaaagttttcccttacataccttgggggccagatgtgaataacacagtttgtaccaatgaaagaggctggataacctaccagggattcctttcccagtggacgctcacgacttatttagatgtacagcggtgcctggaatatttgggctatctaggctattcaatattgactgagcaagagtctcaagcttcagctgttacagtgacaagagataaaaagatagacctgcagaaaaaacaaactcaaagaaatgtgttcagatgtaatgtaattggagtgaaaaactgtgggaaaagtggagttcttcaggctcttcttggaagaaacttaatgaggcagaagaaaattcgtgaagatcataaatcctactatgcgattaacactgtttatgtatatggacaagagaaatacttgttgttgcatgatatctcagaatcggaatttctaactgaagctgaaatcatttgtgatgttgtatgcctggtatatgatgtcagcaatcccaaatcctttgaatactgtgccaggatttttaagcaacactttatggacagcagaataccttgcttaatcgtagctgcaaagtcagacctgcatgaagttaaacaagaatacagtatttcacctactgatttctgcaggaaacacaaaatgcctccaccacaagccttcacttgcaatactgctgatgcccccagtaaggatatctttgttaaattgacaacaatggccatgtatccccatgcccggttacgctgtatgtgcacctgcaacaggtgtacattttgcatctgtcagaacttcctcaactcagacttgctgcaatctgtaaagaacaaaatcttcactgcagttcttaacaggcacgtgacacaagctgacctcaagagctccacgttttggcttcgagcaagttttggtgctactgtttttgcagttttgggctttgctatgtacaaagcattattgaaacagcgatga

SEQ ID NO: 524 - DNA, 744 bp, Homo Sapiens
atggccgcagacacgccggggaaaccgagcgcctcgccgatggcaggagcgccggccagcgccagccggaccccagacaagccccggagcgcggccgagcaccgcaaggtggggtcccggccgggcgtgaggggggcgaccggggggcgggagggacgcgggactcagccggtgcccgacccgcagtcctccaagccggtcatggagaagcggcgccgagcgcgtattaacgagagcctcgctcagctcaaaaccctcatcctggacgccctcagaaaagagagctcccgccactcgaagctggagaaggcggacatcctggagatgaccgtgagacacctgcggagcctgcgtcgcgtgcaggtgacggccgcgctcagcgccgaccccgccgttctgggcaagtaccgcgccggcttccacgagtgtctggcggaggtgaaccgcttcctggccggctgcgagggcgtcccggccgacgtgcgctcccgcctgctgggccacctggcagcctgcctgcgccagctgggaccctcccgccgcccggcctcgctgtccccggctgcccccgcagaggccccagcgcccgaggtctacgcgggccgcccgctgctgccatcgctcggcggccccttccctctgctcgcgccgccgctgctgccgggtctgacccgggcgctgcccgccgcccccagggcggggccgcagggcccgggtgggccctggaggccgtggctgcgctga

SEQ ID NO: 525 - DNA, 1773 bp, Homo Sapiens
atgtcctcggcctgcgacgcgggcgaccactaccccctgcacctcctagtctggaaaaacgactaccggcagctcgagaaggagctgcagggccagaatgtggaggctgtggacccacgaggtcgaacattattgcatcttgctgtttccttgggacatttggaatctgctcgagtcttactccgacataaagcagatgtgacaaaagaaaatcgccagggatggacagttttacatgaggctgtgagcactggcgatcctgagatggtgtacacagttctccaacatcgagactaccacaacacatccatggcccttgagggagttcctgagctgctccaaaaaattctcgaggctccggatttctatgtgcagatgaaatgggaattcaccagctgggtgcccttggtttctagaatatgcccaaatgatgtctgtcgcatctggaaaagtggtgccaaactgcgcgtcgatatcacattgctgggatttgaaaacatgagctggataagagggaggcgtagttttatatttaagggagaagacaactgggcggagttaatggaagtcaaccatgatgacaaagtggtcaccaccgaacgcttcgacctttcccaagaaatggagcgcctcactctggacttgatgaagccaaaaagcagggaagttgagcggcggctcacaagccctgtcattaacaccagcctcgatactaaaaatattgcttttgaaagaactaaatccggattctggggctggaggacagataaagcagaagttgttaatggttacgaagcaaaggtttacacagtaaacaatgtgaatgtgatcaccaaaatacgcacagaacatctgaccgaggaggaaaaaaagagatataaagcagacaggaacccgctggaatctttgctgggaactgtggaacaccaatttggtgcacaaggggacctcaccacggaatgtgctactgcaaacaaccccacagccatcacgcctgatgagtacttcaatgaagagtttgatctgaaagacagggacattggaaggccgaaagagctgacgattagaacacagaagtttaaagcaatgttgtggatgtgtgaagagtttcccctctctctggtggagcaggtcattcccatcattgacctaatggctcgaacgagtgctcattttgcaagactgagagatttcatcaaattggaattcccacctggatttcctgtcaaaatagaaattcccttgtttcatgtcttaaatgcacggattacatttggaaatgttaatggctgtagcactgccgaagaatctgtatctcaaaatgtggaagggacccaggctgattcagcttcccacatcacaaactttgaggttgatcaatctgtgtttgaaattcccgaatcttactatgttcaagacaatggcagaaatgtgcatttgcaagatgaagattacgagataatgcagtttgccatccagcaaagtctgctggagtccagcaggagccaggaactttcaggaccagcttcgaatggagggatcagccagacaaacacctatgacgcccagtatgagagggccatccaggagagcctcctcaccagcacagaaggcctgtgccccagcgccctgagcgagacaagccgttttgataatgacttgcagctagccatggagctctctgccaaagagctggaggaatgggagctccggctccaggaggaagaggctgagctccagcaagtcttacagctgtcactcactgacaaatag

SEQ ID NO: 526 - DNA, 2184 bp, Homo Sapiens
atggcatttcaaaaggcagtgaaagggacgattcttgttggaggaggtgctcttgcaactgttttaggactttctcagtttgctcattacagaaggaaacaaatgaacctggcctatgttaaagcagcagactgcatttcagaaccagttaacagggagcctccttccagagaagctcagctactgactttgcaaaacacatctgaatttgatatccttgttattggaggaggagcaacaggaagtggctgtgcgctagatgctgtcaccagaggactaaaaacagcccttgtagaaagagatgatttctcatcagggaccagcagcagaagcactaaattgatccatggtggtgtgagatatctgcagaaggccatcatgaagttggatattgagcagtataggatggtaaaagaagcccttcatgagcgtgccaacctgctagaaattgctccccatttatcagctccattgcctataatgcttccagtttacaagtggtggcagttaccttactactgggtaggaatcaagctgtatgatttggttgcaggaagcaattgcctaaaaagcagttatgtcctcagcaaatcaagagcccttgaacatttcccaatgctccagaaggacaaactggtaggagcaattgtctactatgacggacaacataacgatgcacggatgaaccttgccattgctctgactgctgccaggtatggggctgccacagccaattacatggaggtagtgagcttgctcaagaagacagacccccagacagggaaagtgcgtgtgagcggcgcacggtgcaaggatgtcctcacagggcaggaatttgacgtgagagccaaatgtgttatcaatgccacgggacctttcacggactctgtgcgcaaaatggatgataaagacgcagcagctatctgccagccaagtgctggtgtccatattgtgatgcctggttattacagcccagagagcatgggacttcttgacccagcgaccagtgatgggcgagttattttcttcttaccctggcaaaagatgacgatcgctggcactactgatactccaactgatgttacacaccatccaattccttcagaagaagatatcaacttcattttgaatgaagtgcgtaattacctgagttgtgatgttgaagtgagaagaggggatgtcctggcagcatggagtggaatccgtcctcttgttacagaccccaaatctgcagatactcagtctatctcccgaaatcatgttgttgatatcagtgagagtggccttattactatagcaggtggaaagtggacaacttatcggtctatggcagaagataccataaatgctgctgtcaaaactcataatttaaaagcaggaccaagtagaacagttgggcttttccttcaagggggtaaagattggagccccacactctacattaggcttgtgcaggattatggacttgaaagcgaggtggcacagcatcttgccgccacctatggtgataaggcctttgaggtggccaaaatggcaagtgtgactggcaaaaggtggcctattgttggagtacgtcttgtgtcagaatttccatatattgaagcagaggtgaaatatgggattaaggagtatgcctgcactgctgtggatatgatttcacgtcgtactcgcctggcctttctaaatgtccaggcagcagaggaagccctacccaggattgttgaactgatgggcagggaactgaattgggatgattataagaagcaggaacaacttgaaacagccaggaagtttctatattatgaaatgggctataaatctcgatcagaacagttaacagatcgctctgaaattagcctactgccttcagacattgacaggtataagaagagatttcataagtttgatgcagaccagaaaggctttattaccattgttgatgttcagcgtgtattagagagtatcaatgtccaaatggatgaaaatacactccatgaaattctaaatgaagttgatttgaataaaaatggacaggttgaactcaatgaatttttgcagctgatgagtgctattcaaaaaggaagggtatctggaagccggcttgctatactaatgaaaactgcagaagagaacctcgacagaagagttccaattccagtggaccgtagttgtggaggattgtga

SEQ ID NO: 527 - DNA, 990 bp, Homo Sapiens
atggtcagcaagtcccgctggaagctcctggccatgttggctctggtcctggtcgtcatggtgtggtattccatctcccgggaagacagtttttattttcccatcccagagaagaaggagccgtgcctccagggtgaggcagagagcaaggcctctaagctctttggcaactactcccgggatcagcccatcttcctgcggcttgaggattatttctgggtcaagacgccatctgcttacgagctgccctatgggaccaaggggagtgaggatctgctcctccgggtgctagccatcaccagctcctccatccccaagaacatccagagcctcaggtgccgccgctgtgtggtcgtggggaacgggcaccggctgcggaacagctcactgggagatgccatcaacaagtacgatgtggtcatcagattgaacaatgccccagtggctggctatgagggtgacgtgggctccaagaccaccatgcgtctcttctaccctgaatctgcccacttcgaccccaaagtagaaaacaacccagacacactcctcgtcctggtagctttcaaggcaatggacttccactggattgagaccatcctgagtgataagaagcgggtgcgaaagggtttctggaaacagcctcccctcatctgggatgtcaatcctaaacagattcggattctcaaccccttcttcatggagattgcagctgacaaactgctgagcctgccaatgcaacagccacggaagattaagcagaagcccaccacgggcctgttggccatcacgctggccctccacctctgtgacttggtgcacattgccggctttggctacccagacgcctacaacaagaagcagaccattcactactatgagcagatcacgctcaagtccatggcggggtcaggccataatgtctcccaagaggccctggccattaagcggatgctggagatgggagctatcaagaacctcacgtccttctga

SEQ ID NO: 528 - DNA, 981 bp, Homo Sapiens
atggactacagccaccaaacgtccctagtcccatgtggacaagataaatacatttccaaaaatgaacttctcttgcatctgaagacctacaacttgtactatgaaggccagaatttacagctccggcaccgggaggaagaagacgagttcattgtggaggggctcctgaacatctcctggggcctgcgccggcccattcgcctgcagatgcaggatgacaacgaacgcattcgaccccctccatcctcctcctcctggcactctggctgtaacctgggggctcagggaaccactctgaagcccctgactgtgcccaaagttcagatctcagaggtggatgccccgccggagggtgaccagatgccaagctccacagactccaggggcctgaagcccctgcaggaggacaccccacagctgatgcgcacacgcagtgatgttggggtgcgtcgccgtggcaatgtgaggacgcctagtgaccagcggcgaatcagacgccaccgcttctccatcaacggccatttctacaaccataagacatccgtgttcacaccagcctatggctctgtcaccaacgtccgcatcaacagcaccatgaccaccccacaggtcctgaagctgctgctcaacaaatttaagattgagaattcagcagaggagtttgccttgtacgtggtccatacgagtggtgagaaacagaagctgaaggccaccgattacccgctgattgcccgaatcctccagggcccatgtgagcagatctccaaagtgttcctaatggagaaggaccaggtggaggaagtcacctacgacgtggcccagtatataaagttcgagatgccggtacttaaaagcttcattcagaagctccaggaggaagaagatcgggaagtaaagaagctgatgcgcaagtacaccgtgctccggctaatgattcgacagaggctggaggagatagccgagaccccagcaacaatctga

SEQ ID NO: 529 - DNA, 1920 bp, Homo Sapiens
atgggagggcatttttggcccccagaaccttacacggtgtttatgtggggaagcccctgggaagcagacagtcctagggtgaagctgagaggcagagagaaggggagacagacagagggtggggctttcccccttgtctccagtgccctttctggtgaccctcggttcttttcccccaccacccccccagcggagcccatcgtggtgaggcttaaggaggtccgactgcagagggacgacttcgagattctgaaggtgatcggacgcggggcgttcagcgaggtagcggtagtgaagatgaagcagacgggccaggtgtatgccatgaagatcatgaacaagtgggacatgctgaagaggggcgaggtgtcgtgcttccgtgaggagagggacgtgttggtgaatggggaccggcggtggatcacgcagctgcacttcgccttccaggatgagaactacctgtacctggtcatggagtattacgtgggcggggacctgctgacactgctgagcaagtttggggagcggattccggccgagatggcgcgcttctacctggcggagattgtcatggccatagactcggtgcaccggcttggctacgtgcacagggacatcaaacccgacaacatcctgctggaccgctgtggccacatccgcctggccgacttcggctcttgcctcaagctgcgggcagatggaacggtgcggtcgctggtggctgtgggcaccccagactacctgtcccccgagatcctgcaggctgtgggcggtgggcctgggacaggcagctacgggcccgagtgtgactggtgggcgctgggtgtattcgcctatgaaatgttctatgggcagacgcccttctacgcggattccacggcggagacctatggcaagatcgtccactacaaggagcacctctctctgccgctggtggacgaaggggtccctgaggaggctcgagacttcattcagcggttgctgtgtcccccggagacacggctgggccggggtggagcaggcgacttccggacacatcccttcttctttggcctcgactgggatggtctccgggacagcgtgcccccctttacaccggatttcgaaggtgccaccgacacatgcaacttcgacttggtggaggacgggctcactgccatggtgagcgggggcggggagacactgtcggacattcgggaaggtgcgccgctaggggtccacctgccttttgtgggctactcctactcctgcatggccctcagggacagtgaggtcccaggccccacacccatggaactggaggccgagcagctgcttgagccacacgtgcaagcgcccagcctggagccctcggtgtccccacaggatgaaacagctgaagtggcagttccagcggctgtccctgcggcagaggctgaggccgaggtgacgctgcgggagctccaggaagccctggaggaggaggtgctcacccggcagagcctgagccgggagatggaggccatccgcacggacaaccagaacttcgccagtcaactacgcgaggcagaggctcggaaccgggacctagaggcacacgtccggcagttgcaggagcggatggagttgctgcaggcagagggagccacagctgtcacgggggtccccagtccccgggccacggatccaccttcccatctagatggccccccggccgtggctgtgggccagtgcccgctggtggggccaggccccatgcaccgccgccacctgctgctccctgccagggtccctaggcctggcctatcggaggcgctttccctgctcctgttcgccgttgttctgtctcgtgccgccgccctgggctgcattgggttggtggcccacgccggccaactcaccgcagtctggcgccgcccaggagccgcccgcgctccctga

SEQ ID NO: 530 - DNA, 4338 bp, Homo Sapiens
atgcggaggttactggaaccgtgttggtggattttgttcctgaaaatcaccagttccgtgctccattatgtcgtgtgcttccccgcgttgacagaaggctacgttggggccctgcacgagaatagacacggcagcgcagtgcagatccgcaggcgcaaggcttcaggcgacccgtactgggcctactctggtgcctatggtcctgagcactgggtcacgtctagtgtcagctgtgggggccgtcaccagtctcctattgacattttagaccagtatgcgcgtgttggggaagaataccaggaactgcaactcgatggcttcgacaatgagtcttctaacaaaacctggatgaaaaacacagggaaaacagtcgccatccttctgaaagacgactattttgtcagtggagctggtctacctggcagattcaaagctgagaaggtggaatttcactggggccacagcaatggctcagcgggctctgaacacagcatcaatggcaggaggtttcctgttgagatgcagattttcttttacaatccagatgactttgacagctttcaaaccgcaatttctgagaacagaataatcggagccatggccatattttttcaagtcagtccgagggacaattctgcactggatcctattatccacgggttgaagggtgtcgtacatcatgagaaggagacctttctggatcctttcgtcctccgggacctcctgcctgcatccctgggcagctattatcggtacacaggttccttgaccacaccaccgtgtagcgaaatagtggagtggatagtcttccggagacccgtccccatctcttaccatcagcttgaggctttttattccatcttcaccacggagcagcaagaccatgtcaagtcggtggagtatctgagaaataactttcgaccacagcagcgtctgcatgacagggtggtgtccaagtccgccgtccgtgactcctggaaccacgacatgacagacttcttagaaaacccactggggacagaagcctctaaagtttgcagctctccacccatccacatgaaggtgcagcctctgaaccagacggcactgcaggtgtcctggagccagccggagactatctaccacccacccatcatgaactacatgatctcctacagctggaccaagaatgaggacgagaaggagaagacgtttacaaaggacagcgacaaagacttgaaagccaccattagccatgtctcacccgatagcctttacctgttccgagtccaggccgtgtgtcggaacgacatgcgcagcgactttagccagacgatgctgtttcaagctaataccactcgaatattccaagggaccagaatagtgaaaacaggagtgcccacagcgtctcctgcctcttcagccgacatggcccccatcagctcggggtcttctacctggacgtcctctggcatcccattctcatttgtttccatggcaactgggatgggcccctcctccagtggcagccaggccacagtggcctcggtggtcaccagcacgctgctcgccggcctggggttcggcggtggtggcatctcctctttccccagcactgtgtggcccacgcgcctcccgacggccgcctcagccagcaagcaggcggctaggccagtcctagccaccacagaggccttggcttctccagggcccgatggtgattcgtcaccaaccaaggacggcgagggcaccgaggaaggagagaaggatgagaaaagcgagagtgaggatggggagcgggagcacgaggaggatggagagaaggactccgaaaagaaggagaagagtggggtgacccacgctgccgaggagcggaatcagacggagcccagccccacaccctcgtctcctaacaggactgccgagggagggcatcagactatacctgggcatgagcaggatcacactgccgtccccacagaccagacgggcggaaggagggatgccggcccaggcctggaccccgacatggtcacctccacccaagtgccccccaccgccacagaggagcagtatgcagggagtgatcccaagaggcccgaaatgccatctaaaaagcctatgtcccgcggggaccgattttctgaagacagcagatttatcactgttaatccagcggaaaaaaacacctctggaatgataagccgccctgctccagggaggatggagtggatcatccctctgattgtggtatcagccttgaccttcgtgtgcctcatccttctcattgctgtgctcgtttactggagagggtgtaacaaaataaagtccaagggctttcccagacgtttccgtgaagtgccttcttctggggagagaggagagaaggggagcagaaaatgttttcagactgctcatttctatgtggaagacagcagttcacctcgagtggtccctaatgaaagtatccctattattcctattccggatgacatggaagccattcctgtcaaacagtttgtcaaacacatcggtgagctctattctaataaccagcatgggttctctgaggattttgaggaagtccagcgctgtactgctgatatgaacatcactgcagagcattccaatcatccagaaaacaagcacaaaaacagatacatcaacattttagcatatgatcacagtagggtgaagttaagacctttaccaggaaaagactctaagcacagcgactacattaatgcaaactatgttgatggttacaacaaagcaaaagcctacattgccacccaaggacctttgaagtctacatttgaagatttctggaggatgatttgggaacaaaacactggaatcattgtgatgattacgaaccttgtggaaaaaggaagacgaaaatgtgatcagtattggccaacagagaacagtgaggaatatggaaacattattgtcacgctgaagagcacaaaaatacatgcctgctacactgttcgtcgtttttcaatcagaaatacaaaagtgaaaaagggtcagaagggaaatcccaagggtcgtcagaatgaaagggtagtgatccagtatcactatacacagtggcctgacatgggagttcccgagtatgcccttccagtactgactttcgtgaggagatcctcagcagctcggatgccagaaacgggccctgtgttggtgcactgcagtgctggtgtgggcagaacaggcacctatattgtaatagacagcatgctgcaacagataaaagacaaaagcacagttaacgtcctgggattcctgaagcatatcaggacacagcgtaactacctcgtccagactgaggagcagtacattttcatccatgatgccttgttggaagccattcttggaaaggagactgaagtatcttcaaatcagctgcacagctatgttaacagcatccttataccaggagtaggaggaaagacacgactggaaaagcaattcaagctggtcacacagtgtaatgcaaaatatgtggaatgtttcagtgctcagaaagagtgtaacaaagaaaagaacagaaactcttcagttgtgccatctgagcgtgctcgagtgggtcttgcaccattgcctggaatgaaaggaacagattacattaatgcttcttatatcatgggctattataggagcaatgaatttattataactcagcatcctctgccacatactacgaaagatttctggcgaatgatttgggatcataacgcacagatcattgtcatgctgccagacaaccagagcttggcagaagatgagtttgtgtactggccaagtcgagaagaatccatgaactgtgaggcctttaccgtcacccttatcagcaaagacagactgtgcctctctaatgaagaacaaattatcatccatgactttatccttgaagctacacaggatgactatgtcttagaagttcggcactttcagtgtcccaaatggcctaacccagatgcccccataagtagtacctttgaacttatcaacgtcatcaaggaagaggccttaacaagggatggtcccaccattgttcatgatgagtatggagcagtttcagcaggaatgttatgtgcccttaccaccctgtcccagcaactggagaatgaaaatgctgtggatgttttccaggttgcaaaaatgatcaatcttatgaggcctggagtattcacagacattgaacaataccagttcatctataaagcaatgcttagcttggtcagcactaaagaaaatggaaatggtcccatgacagtagacaaaaatggtgctgttcttattgcagatgaatcagaccctgctgagagcatggagtccctagtgtga

SEQ ID NO: 531 - DNA, 3159 bp, Homo Sapiens
atgaagcttgtcaacatctggctgcttctgctcgtggttttgctctgtgggaagaaacatctgggcgacagactggaaaagaaatcttttgaaaaggccccatgccctggctgttcccacctgactttgaaggtggaattctcatcaacagttgtggaatatgaatatattgtggctttcaatggatactttacagccaaagctagaaattcatttatttcaagtgccctgaagagcagtgaagtagacaattggagaattatacctcgaaacaatccatccagtgactaccctagtgattttgaggtgattcagataaaagaaaaacagaaagcggggctgctaacacttgaagatcatccaaacatcaaacgggtcacgccccaacgaaaagtctttcgttccctcaagtatgctgaatctgaccccacagtaccctgcaatgaaacccggtggagccagaagtggcaatcatcacgtcccctgcgaagagccagcctctccctgggctctggcttctggcatgctacgggaaggcattcgagcagacggctgctgagagccatcccgcgccaggttgcccagacactgcaggcagatgtgctctggcagatgggatatacaggtgctaatgtaagagttgctgtttttgacactgggctgagcgagaagcatccccacttcaaaaatgtgaaggagagaaccaactggaccaacgagcgaacgctggacgatgggttgggccatggcacattcgtggcaggtgtgatagccagcatgagggagtgccaaggatttgctccagatgcagaacttcacattttcagggtctttaccaataatcaggtatcttacacatcttggtttttggacgccttcaactatgccattttaaagaagatcgacgtgttaaacctcagcatcggcggcccggacttcatggatcatccgtttgttgacaaggtgtgggaattaacagctaacaatgtaatcatggtttctgctattggcaatgacggacctctttatggcactctgaataaccctgctgatcaaatggatgtgattggagtaggcggcattgactttgaagataacatcgcccgcttttcttcaaggggaatgactacctgggagctaccaggaggctacggtcgcatgaaacctgacattgtcacctatggtgctggcgtgcggggttctggcgtgaaaggggggtgccgggccctctcagggaccagtgttgcttctccagtggttgcaggtgctgtcaccttgttagtgagcacagtccagaagcgtgagctggtgaatcccgccagtatgaagcaggccctgatcgcgtcagcccggaggctccccggggtcaacatgtttgagcaaggccacggcaagctcgatctgctcagagcctatcagatcctcaacagctacaagccacaggcaagtttgagccccagctacatagatctgactgagtgtccctacatgtggccctactgctcccagcccatctactatggaggaatgccgacagttgttaatgtcaccatcctcaacggcatgggagtcacaggaagaattgtagataagcctgactggcagccctatttgccacagaacggagacaacattgaagttgccttctcctactcctcggtcttatggccttggtcgggctacctggccatctccatttctgtgaccaagaaagcggcttcctgggaaggcattgctcagggccatgtcatgatcactgtggcttccccagcagagacagagtcaaaaaatggtgcagaacagacttcaacagtaaagctccccattaaggtgaagataattcctactcccccgcgaagcaagagagttctctgggatcagtaccacaacctccgctatccacctggctatttccccagggataatttaaggatgaagaatgaccctttagactggaatggtgatcacatccacaccaatttcagggatatgtaccagcatctgagaagcatgggctactttgtagaggtcctcggggcccccttcacgtgttttgatgccagtcagtatggcactttgctgatggtggacagtgaggaggagtacttccctgaagagatcgccaagctccggagggacgtggacaacggcctctcgctcgtcatcttcagtgactggtacaacacttctgttatgagaaaagtgaagttttatgatgaaaacacaaggcagtggtggatgccggataccggaggagctaacatcccagctctgaatgagctgctgtctgtgtggaacatggggttcagcgatggcctgtatgaaggggagttcaccctggccaaccatgacatgtattatgcgtcagggtgcagcatcgcgaagtttccagaagatggcgtcgtgataacacagactttcaaggaccaaggattggaggttttaaagcaggaaacagcagttgttgaaaacgtccccattttgggactttatcagattccagctgagggtggaggccggattgtactgtatggggactccaattgcttggatgacagtcaccgacagaaggactgcttttggcttctggatgccctcctccagtacacatcgtatggggtgacaccgcctagcctcagtcactctgggaaccgccagcgccctcccagtggagcaggctcagtcactccagagaggatggaaggaaaccatcttcatcggtactccaaggttctggaggcccatttgggagacccaaaacctcggcctctaccagcctgtccacgcttgtcttgggccaagccacagcctttaaacgagacggcgcccagtaacctttggaaacatcagaagctactctccattgacctggacaaggtggtgttacccaactttcgatcgaatcgccctcaagtgaggcccttgtcccctggagagagcggcgcctgggacattcctggagggatcatgcctggccgctacaaccaggaggtgggccagaccattcctgtctttgccttcctgggagccatggtggtcctggccttctttgtggtacaaatcaacaaggccaagagcaggccgaagcggaggaagcccagggtgaagcgcccgcagctcatgcagcaggttcacccgccaaagaccccttcggtgtga

SEQ ID NO: 532 - DNA, 1671 bp, Homo Sapiens
atggcggtggcggcggcagctgcggcgggacccgtgttctggaggcgactgctgggcctcctgcctggccgcccagggctggccgcgctcctgggacgcctgtccgaccgcctcggcaggaaccgggaccgccagcgcaggaggtcaccatggctgttattggctcccttgctgtccccagctgttccccaggtcacctccccaccttgctgcctgtgtccagaaggcgtgcaccggttccagtggatcagaaacctggttccagaatttggagtctccagttctcacgttagggtgctttcttccccggcagagtttttcgagctcatgaaggggcagataagagtagccaagaggcgggtcgtgatggcatccctctacctggggacaggtcctttggaacaggagctggtggactgcctggaaagtactctagaaaagtcactccaagcaaagtttccttcaaatctcaaggtctccattctcttagacttcacgcggggctcacgaggccggaagaactcccgcacaatgctgctcccactcctgcggaggttcccagagcaggtccgagtctccctctttcacacgccgcacctccgtgggctgcttcggctcctcatccctgagcgcttcaacgagaccatcggcctccagcacattaaggtgtacctcttcgacaacagcgtcatcttgagcggtgcaaacctgagtgactcctacttcaccaaccgccaggaccgctacgtgttcctgcaggactgtgcggagattgccgacttcttcacggagctggtggacgcggtgggggatgtgtccctgcagctgcagggggacgacacggtgcaggtggtggatgggatggtgcatccttacaaaggggaccgggccgagtactgcaaggcagccaataagagggtcatggatgtgatcaactcagccaggacccgccagcagatgctgcatgcccagaccttccacagcaactctcttttgacccaggaagatgcagcagctgctggggatcgcagaccagcccctgacacctggatttatccgctgattcagatgaagcccttcgagattcaaatcgatgagattgtcactgagaccctgttgactgaggcggagcgcggggcaaaggtctacctcaccactggctatttcaacctgacccaggcctacatggacctggtcttgggcactcgggctgagtaccagatcctgctggcctcaccagaggtgaatggcttctttggggccaagggggtggccggcgccatcccagcggcctatgtgcacatcgagcgacagttcttcagtgaggtgtgcagcctgggacagcaggagcgggtccagcttcaggagtactggcggaggggctggacgttccacgccaaaggcctctggctgtacctggcagggagcagcctgccctgtctcacgctgattggctctcctaattttgggtacaggtcagttcaccgggacctggaggcccagattgcgatcgtgacggagaaccaggccctgcagcagcagcttcaccaggagcaagagcagctctacctgaggtcaggtgtggtgtcctctgccaccttcgagcagccgagtcgccaggtgaagctgtgggtgaagatggtgactccactgatcaagaacttcttctga

SEQ ID NO: 533 - DNA, 636 bp, Homo Sapiens
atgaccacgctcacacgacaagacctcaactttggccaagtggtggccgatgtgctctgcgagttcctggaggtggctgtgcatctcatcctctacgtgcgcgaggtctaccccgtgggcatcttccagaaacgcaagaagtacaacgtgccggtccagatgtcctgccacccggagctgaatcagtatatccaggacacgctgcactgcgtcaagccactcctggagaagaatgatgtggagaaagtggtggtggtgattttggataaagagcaccgcccagtggagaaattcgtctttgagatcacccagcctccactgctgtccatcagctcagactcgctgttgtctcatgtggagcagctgctccgggccttcatcctgaagatcagcgtgtgcgatgccgtcctggaccacaaccccccaggctgtaccttcacagtcctggtgcacacgagagaagccgccactcgcaacatggagaagatccaggtcatcaaggatttcccctggatcctggcggatgagcaggatgtccacatgcatgacccccggctgataccactaaaaaccatgacgtcggacattttaaagatgcagctttacgtggaagagcgcgctcataaaggcagctga

SEQ ID NO: 534 - DNA, 255 bp, Homo Sapiens
atgcctttggctagagatttactacatccgtccttggaagaggaaaagaaaaaacataaaaagaaacgcctagtacaaagtccaaattcttactttatggatgtaaaatgtccaggttgctacaagatcaccacggttttcagccatgctcagacagtggttctttgtgtaggttgttcaacagtgttgtgccagcctacaggaggaaaggccagactcacagaagggtgttcatttagaagaaagcaacactaa

SEQ ID NO: 535 - DNA, 2976 bp, Homo Sapiens
atgcacagccccggcgctgatgggacccaggtgagcccgggtgcccactactgcagccccactggcgcaggctgccccaggccctgtgcagacacaccaggccctcagccgcagcccatggacctgcgggtgggccagcggcccccagtggagcccccaccagagcccacattgctggccctgcagcgtccccagcgcctgcaccaccacctcttcctagcaggcctgcagcagcagcgctcggtggagcccatgaggctctccatggacacgccgatgcccgagttgcaggtgggaccccaggaacaagagctgcggcagcttctccacaaggacaagagcaagcgaagtgctgtagccagcagcgtggtcaagcagaagctagcggaggtgattctgaaaaaacagcaggcggccctagaaagaacagtccatcccaacagccccggcattccctacagaaccctggagcccctggagacggaaggagccacccgctccatgctcagcagctttttgcctcctgttcccagcctgcccagtgaccccccagagcacttccctctgcgcaagacagtctctgagcccaacctgaagctgcgctataagcccaagaagtccctggagcggaggaagaatccactgctccgaaaggagagtgcgccccccagcctccggcggcggcccgcagagaccctcggagactcctccccaagtagtagcagcacgcccgcatcagggtgcagctcccccaatgacagcgagcacggccccaatcccatcctgggctcggaggcgctcttgggccagcggctgcggctgcaggagacttctgtggccccgttcgccttgccgacagtgtccttgctgcccgcaatcactctggggctgcccgcccctgccagggctgacagtgaccgcaggacccatccgactctgggccctcgggggccaatcctggggagcccccacactcccctcttcctgccccatggcttggagcccgaggctgggggcaccttgccctctcgcctgcagcccattctcctcctggacccctcaggctctcatgccccgctgctgactgtgcccgggcttgggcccttgcccttccactttgcccagtccttaatgaccaccgagcggctctctgggtcaggcctccactggccactgagccggactcgctcagagcccctgccccccagtgccaccgctcccccaccgccgggccccatgcagccccgcctggagcagctcaaaactcacgtccaggtgatcaagaggtcagccaagccgagtgagaagccccggctgcggcagataccctcggctgaagacctggagacagatggcgggggaccgggccaggtggtggacgatggcctggagcacagggagctgggccatgggcagcctgaggccagaggccccgctcctctccagcagcaccctcaggtgttgctctgggaacagcagcgactggctgggcggctcccccggggcagcaccggggacactgtgctgcttcctctggcccagggtgggcaccggcctctgtcccgggctcagtcttccccagccgcacctgcctcactgtcagccccagagcctgccagccaggcccgagtcctctccagctcagagacccctgccaggaccctgcccttcaccacagggctgatctatgactcggtcatgctgaagcaccagtgctcctgcggtgacaacagcaggcacccggagcacgccggccgcatccagagcatctggtcccggctgcaggagcgggggctccggagccagtgtgagtgtctccgaggccggaaggcctccctggaagagctgcagtcggtccactctgagcggcacgtgctcctctacggcaccaacccgctcagccgcctcaaactggacaacgggaagctggcagggctcctggcacagcggatgtttgtgatgctgccctgtggtggggttggggtggacactgacaccatctggaatgagcttcattcctccaatgcagcccgctgggccgctggcagtgtcactgacctcgccttcaaagtggcttctcgtgagctaaagaatggtttcgctgtggtgcggcccccaggacaccatgcagatcattcaacagccatgggcttctgcttcttcaactcagtggccatcgcctgccggcagctgcaacagcagagcaaggccagcaagatcctcattgtagactgggacgtgcaccatggcaacggcacccagcaaaccttctaccaagaccccagtgtgctctacatctccctgcatcgccatgacgacggcaacttcttcccggggagtggggctgtggatgaggtaggggctggcagcggtgagggcttcaatgtcaatgtggcctgggctggaggtctggacccccccatgggggatcctgagtacctggctgctttcaggatagtcgtgatgcccatcgcccgagagttctctccagacctagtcctggtgtctgctggatttgatgctgctgagggtcacccggccccactgggtggctaccatgtttctgccaaatgttttggatacatgacgcagcaactgatgaacctggcaggaggcgcagtggtgctggccttggagggtggccatgacctcacagccatctgtgacgcctctgaggcctgtgtggctgctcttctgggtaacagggtggatcccctttcagaagaaggctggaaacagaaacccaacctcaatgccatccgctctctggaggccgtgatccgggtgcacagtaaatactggggctgcatgcagcgcctggcctcctgtccagactcctgggtgcctagagtgccaggggctgacaaagaagaagtggaggcagtgaccgcactggcgtccctctctgtgggcatcctggctgaagataggccctcggagcagctggtggaggaggaagaacctatgaatctctaa

SEQ ID NO: 536 - DNA, 1392 bp, Homo Sapiens
atggcccagggtttggtgacgttcgccgacgtagccatagacttttctcaggaggagtgggcctgtctgaactctgctcagagggacctgtactgggacgtgatgctggagaactacagtaacttggtctcactggatttggagtcagcatatgaaaataagagtttacctacagaaaaaaacattcatgaaataagggcttccaaaaggaattcagatagaagaagtaaatcccttggccgtaactggatatgtgaaggtacgcttgaaagaccacagcgctccagagggaggtatgtcaatcagatgatcatcaattatgtcaaaagacctgctactagagaaggcacccctcctagaacacatcagagacatcataaggagaattcctttgaatgtaaggactgtgggaaggcctttagtcgtggctatcaacttagtcaacatcagaaaatccatactggtgagaaaccttatgaatgtaaagaatgtaagaaggccttccgttggggcaatcagcttactcaacatcaaaaaattcatactggggagaagccctacgaatgtaaagactgtgggaaggcttttcgatggggctcaagcctcgttattcataagaggattcatactggtgaaaaaccctatgaatgtaaagactgtggaaaggcctttcggcgtggtgatgagctcactcagcaccagagattccacactggggagaaagactacgaatgcaaagactgtgggaagacctttagccgtgtgtataaacttattcagcacaagagaattcatagtggggagaagccttacgagtgtaaagactgtgggaaggcttttatttgtggttcaagcctcattcagcataaaagaattcacacaggtgagaaaccctatgaatgtcaagaatgtgggaaggcctttactcgagtcaattaccttactcagcatcagaagatccacaccggtgagaagcctcacgaatgtaaggagtgtgggaaggcctttcgctggggttcgagcctcgttaagcacgagaggatacatacgggcgagaagccgtacaagtgcacagaatgtgggaaggccttcaattgtggctatcacctcactcagcacgagagaatccacacaggcgaaaccccgtataaatgtaaggagtgtgggaaggctttcatttatggatcgagcctcgtgaaacatgagagaattcataccggggtgaaaccctatgggtgtacagaatgtgggaagagctttagtcacggccatcagcttacacaacatcagaaaacgcacagtggggcgaaatcctacgaatgtaaggagtgcgggaaggcatgtaaccacctaaaccatctccgagaacatcagaggatccacaacagttga

SEQ ID NO: 537 - DNA, 3684 bp, Homo Sapiens
atggcggccgttttggagtcgctgctgcgagaagaggtgtcggtcgcagccgtcgtgcggtggatcgcgcgcagcacccagggttcggaggataacgctggggaggcggccgcgctgagctcactccgggccctgcggaaagaattcgtaccgttcctgttgaacttcctgagggagcagagcagccgcgtcctcccgcaggggcccccgacccccgccaagaccccgggcgcctcggcagccttgccagggaggccgggaggcccgccgcggggtagccgcggggcgcgcagccagcttttccctccgaccgaggcccagagcaccgctgccgaggcccctctggcccgccgcgggggcaggaggcggggcccggggccggcccgcgagcgtggaggccgcggcctggaggagggggtcagcggggagagcctgcccggagccgggggccggaggcttaggggctctggcagccccagccgccccagcctcacgctgtctgatccgccaaacctcagcaacctggaggagttccctcccgtaggctcggttccccccggccctacagggacgaagccttctcgcaggatcaacccaactccggtgagcgaagagcggtcactctccaagcccaagacctgcttcacctcacccccaatcagctgtgtccccagttcccaaccctcagccctggacactagcccttggggccttggccttcccccagggtgcagaagtctgcaagaggagcgagagatgctcaggaaggagcgctctaagcagctgcagcagtcacctacccccacctgtcccaccccagaattggggtcgcccctccccagccggacaggaagcctcacagatgaacctgcagaccctgccagagtgtcttcccgccagcgcctggagcttgtagcccttgtttactcctcgtgcattgctgagaacctggtaccaaacctcttcttggagcttttcttcgtctttcagctcctcactgcccggaggatggtgactgccaaggacagcgaccctgaactaagtccagctgtcctagattccctggaaagtccactgttccaaagcatccacgattgtgtcttctttgcagtgcaggttttggagtgtcactttcaggttctttccaacctggacaaagggaccttgaagctgctggctgagaatgagcggctgctgtgcttctcaccagctctgcaaggccgccttcgagctgcctatgagggcagtgttgccaaggtctctctggtgatgcctccctctactcaagctgtctcctttcagccagagactgacaatcgtgccaacttctccagtgaccgagcctttcatacttttaagaaacagagggatgtgttttatgaggtgctgcgagagtgggaagatcaccatgaggagcctggctgggattttgagaagggcttgggcagcagaatcagggccatgatgggtcagctctccgcagcctgcagccacagccactttgttcggcttttccaaaaacaactactccagatgtgtcagagccctggtggtgctgggggcaccgtcttgggcgaggccccagatgtgttgagtatgctgggagctgacaagctggggcggttgtggcgcctacaggaacggcttatggctcctcagagcagtggggggccctgcccaccccccaccttcccaggctgtcaaggcttctttagggacttcatccttagtgccagcagcttccagtttaaccagcatctcatggacagtctgagcttgaagatccaggagctcaatggtcttgccctgccccagcatgagcccaatgatgaagacggggagtcagacgtagactggcagggtgagcggaagcaatttgctgtggtgcttcttagcctgagacttttggctaaattcctgggctttgtggctttcctgccataccgggggcctgaacctcccccgaccggtgagcttcaggactccattctggccctcaggagccaggtccctccggtcctggatgtgcggactctgctgcagcgagggctgcaggcccgccgggcggtgctcaccgtgccctggctggtggagtttctctcctttgctgaccatgttgttcccttgctggaatattaccgggacatcttcactctcctgctgcgcctgcaccggagcttggtgttgtcgcaggagagtgaggggaagatgtgtttcctgaacaagctgctgctacttgctgtcctgggctggcttttccagattcccacagtccctgaggacttgttctttctggaagagggtccctcatatgcctttgaggtggacacagtagccccagagcatggcttggacaatgcgcctgtggtggaccagcagctgctctacacctgctgcccctacatcggagagctccggaaactgctcgcttcgtgggtgtcaggcagtagtggacggagtgggggcttcatgaggaaaatcacccccaccactaccaccagcctgggagcccagccttcccagaccagccaggggctgcaggcacagctcgcccaggcctttttccacaaccagccgccctccttgcgccggaccgtagagttcgtggcagaaagaattggatcaaactgtgtcaaacatatcaaggctacactggtggcagatctggtgcgccaggcagagtcacttctccaagagcagctggtgacacagggagaggaagggggagacccagcccagctgttggagatcttgtgttcccagctgtgccctcacggggcccaggcattggccctggggcgggagttctgtcaaaggaagagccctggggctgtgcgggcgctgcttccagaggagaccccggcagccgttctgagcagtgcagagaacattgctgtggggcttgcaacagagaaagcctgtgcttggctgtcagccaacatcacagcactgatcaggagggaggtgaaagcagcagtgagtcgcacacttcgagcccagggtcctgaacctgctgcccggggggagcggaggggctgctcccgcgcctgtgagcaccatgctcccctcccctcccacctcatctccgagataaaagacgtgctctccttggccgtggggccacgggaccctgacgagggagtctccccagagcatctggaacagctcctaggccagctgggccagacgctgcggtgccgccagttcctgtgcccacctgctgagcagcatctggcaaagtgctctgtggagttagcttccctcctcgttgcagatcaaattcctatcctagggcccccggcacagtacaggctggagagagggcaggctcgaaggcttctgcacatgctgctttccttgtggaaggaagactttcaggggccggttccgctgcagctgctgctgagcccaagaaatgtggggcttctggcagacacaaggccaagggagtgggacttgctgctattcttgctacgggagctggtggagaagggtctgatgggacggatggagatagaggcctgcctgggcagcctccaccaggcccagtggccaggggactttgctgaagaattagcaacactgtctaatctgtttctagccgagccccacctgccagaaccccagctaagagcctgtgagttggtgcagccaaaccggggcactgtgctggcccagagctag

SEQ ID NO: 538 - DNA, 462 bp, Homo Sapiens
atgggggcgccgctgctctctcccggctggggagccggggctgccggccggcgctggtggatgctgctggcgcccctgctgccggcgctgctgctggtgcggcccgcgggggccctggtggaggggctctactgcggcacgcgggactgctacgaggtgctgggcgtgagccgctcggcgggcaaggcggagatcgcgcgggcctaccgccagctggcccggcgctaccaccctgaccgctaccggccccagcccggagacgagggccccgggcggacgccgcagagcgccgaggaggctttcctgctggtggcaaccgcctacgagacactcaaggtctctcaggcagctgcagagcttcaacagtactgtatgcagaatgcctgcaaggatgccctgctggtgggtgttccagctggaagtaaccccttccgggagcctagatcctgtgctttactctga

SEQ ID NO: 539 - DNA, 1104 bp, Homo Sapiens
atgagcagcaccttagctaagatcgcggagatagaagcagagatggctcggactcaaaagaacaaggccacagcacaccacttagggctgcttaaggctcgtcttgctaagcttcgtcgagaactcattactccaaagggtggtggtggtggaggtccaggagaaggttttgatgtggccaagacaggtgatgctcgaattggatttgttggttttccatctgtggggaagtcaacactgcttagtaacctggcaggggtatattctgaggtggcagcctatgaattcactactctgaccactgtgcctggtgtcatcagatacaaaggtgccaagatccagctcctggatctcccaggtatcattgaaggtgccaaggatgggaaaggtagaggtcgtcaagtcattgcagtggcccgaacctgtaacttgatcttgattgttctggatgtcctgaaacctttgggacataagaagataattgaaaatgagctggaaggctttggcattcgcttgaacagcaaaccccccaacattggctttaagaagaaggacaagggaggcattaatctcacagccacttgcccccagagtgagctggatgctgaaactgtgaagagcattctggctgaatacaagattcataatgccgatgtgactctacgtagtgatgctacagctgatgacctcattgatgtggtggaaggaaacagagtttatatcccctgtatctatgtgttaaataagattgaccaaatctccattgaggaattggatatcatctataaggtgcctcactgtgtacccatctctgcccatcaccgctggaattttgatgacctattggaaaagatctgggactatctgaaactagtgagaatttacaccaaacccaaaggccagttaccagattacacatccccagtggtgcttccttactccaggaccacagtggaggatttctgcatgaagattcacaaaaatcttatcaaagaatttaaatatgctctggtctggggtctctctgtgaaacacaatcctcagaaagtgggtaaagaccatacgttggaggatgaggatgtcattcaaattgtgaagaagtga

SEQ ID NO: 540 - DNA, 2058 bp, Homo Sapiens
atggatgtatgcgtccgtcttgccctgtggctcctctggggactcctcctgcaccagggccagagcctcagccatagtcacagtgagaaggcgacaggaaccagctcgggggccaactctgaggagtccactgcagcagagttttgccgaattgacaagcccctgtgtcacagtgaggatgagaaactcagcttcgaggcagtccgtaacatccacaaactgatggacgatgatgccaatggtgatgtggatgtggaagaaagtgatgagttcctgagggaagacctcaattaccatgacccaacagtgaaacacagcaccttccatggtgaggataagctcatcagcgtggaggacctgtggaaggcatggaagtcatcagaagtatacaattggaccgtggatgaggtggtacagtggctgatcacatatgtggagctgcctcagtatgaggagaccttccggaagctgcagctcagtggccatgccatgccaaggctggctgtcaccaacaccaccatgacagggactgtgctgaagatgacagaccggagtcatcggcagaagctgcagctgaaggctctggatacagtgctctttgggcctcctctcttgactcgccataatcacctcaaggacttcatgctggtggtgtctatcgttattggtgtgggcggctgctggtttgcctatatccagaaccgttactccaaggagcacatgaagaagatgatgaaggacttggaggggttacaccgagctgagcagagtctgcatgaccttcaggaaaggctgcacaaggcccaggaggagcaccgcacagtggaggtggagaaggtccatctggaaaagaagctgcgcgatgagatcaaccttgctaagcaggaagcccagcggctgaaggagctgcgggagggtactgagaatgagcggagccgccaaaaatatgctgaggaggagttggagcaggttcgggaggccttgaggaaagcagagaaggagctagaatctcacagctcatggtatgctccagaggcccttcagaagtggctgcagctgacacatgaggtggaggtgcaatattacaacatcaagaagcaaaatgctgagaagcagctgctggtggccaaggagggggctgagaagataaaaaagaagagaaacacactctttggcaccttccacgtggcccacagctcttccctggatgatgtagatcataaaattctaacagctaagcaagcactgagcgaggtgacagcagcattgcgggagcgcctgcaccgctggcaacagatcgagatcctctgtggcttccagattgtcaacaaccctggcatccactcactggtggctgccctcaacatagaccccagctggatgggcagtacacgccccaaccctgctcacttcatcatgactgacgacgtggatgacatggatgaggagattgtgtctcccttgtccatgcagtcccctagcctgcagagcagtgttcggcagcgcctgacggagccacagcatggcctgggatctcagagggatttgacccattccgattcggagtcctccctccacatgagtgaccgccagcgtgtggcccccaaacctcctcagatgagccgtgctgcagacgaggctctcaatgccatgacttccaatggcagccaccggctgatcgagggggtccacccagggtctctggtggagaaactgcctgacagccctgccctggccaagaaggcattactggcgctgaaccatgggctggacaaggcccacagcctgatggagctgagcccctcagccccacctggtggctctccacatttggattcttcccgttctcacagccccagctccccagacccagacacaccatctccagttggggacagccgagccctgcaagccagccgaaacacacgcattccccacctggctggcaagaaggctgtggctgaggaggataatggctctattggcgaggaaacagactccagcccaggccggaagaagtttcccctcaaaatctttaagaagcctcttaagaagtag

SEQ ID NO: 541 - DNA, 1041 bp, Homo Sapiens
atggcggcttctcaggcggtggaggaaatgcggagccgcgtggttctgggggagtttggggttcgcaatgtccatactactgactttcccggtaactattccggttatgatgatgcctgggaccaggaccgcttcgagaagaatttccgtgtggatgtagtacacatggatgaaaactcactggagtttgacatggtgggaattgacgcagccattgccaatgcttttcgacgaattctgctagctgaggtgccaactatggctgtggagaaggtcctggtgtacaataatacatccattgttcaggatgagattcttgctcaccgtctggggctcattcccattcatgctgatccccgtctttttgagtatcggaaccaaggagatgaagaaggcacagagatagatactctacagtttcgtctccaggtcagatgcactcggaacccccatgctgctaaagattcctctgaccccaacgaactgtacgtgaaccacaaagtgtataccaggcatatgacatggatccccctggggaaccaggctgatctctttccagagggcactatccgaccagtgcatgatgatatcctcatcgctcagctgcggcctggccaagaaattgacctgctcatgcactgtgtcaagggcattggcaaagatcatgccaagttttcaccagtggcaacagccagttacaggctcctgccagacatcaccctgcttgagcccgtggaaggggaggcagctgaggagttgagcaggtgcttctcacctggtgttattgaggtgcaggaagtccaaggtaaaaaggtggccagagttgccaacccccggctggataccttcagcagagaaatcttccggaatgagaagctaaagaaggttgtgaggcttgcccgggttcgagatcattatatcttctctgttgagtcaacgggggtgttgccaccagatgtgctggtgagtgaagccatcaaagtactgatggggaagtgccggcgcttcttggatgaactagatgcggttcagatggactga

SEQ ID NO: 542 - DNA, 2304 bp, Homo Sapiens
atggcgacatacctggagttcatccagcagaatgaagaacgggatggtgtgcgttttagttggaacgtgtggccttccagccggctggaggctacaagaatggttgtacccctggcttgtctccttactcctttgaaagaacgtccagacctacctcctgtacaatatgaacctgtgctttgcagcaggccaacttgtaaagctgttctcaacccactttgtcaggttgattatcgagcaaaactttgggcctgtaatttctgttttcaaagaaatcagtttcctccagcttatggaggcatatctgaggtgaatcaacctgccgaattgatgccccagttttctacaattgagtacgtgatacagcgaggtgctcagtcccctctgatctttctctatgtggttgacacatgcctggaggaagatgaccttcaagcactcaaagagtccctgcagatgtccctgagtcttcttcctccagatgctctggtgggtctgatcacatttggaaggatggtgcaggttcatgagctaagctgtgaaggaatctccaaaagttatgtcttccgagggaccaaggatttaactgcaaagcaaatacaggatatgttgggcctgaccaagccagccatgcccatgcagcaagcacgacctgcacaaccacaggagcacccttttgcttcaagcagatttctgcagcctgttcacaagattgatatgaacctcactgatcttcttggggagctacagagggacccatggccagtaactcaggggaagagacctttgcgatccactggtgtggctttgtccattgctgttggcttgctggagggcacttttccaaacacaggagccaggatcatgctgtttactggaggtccccctacccaagggcctggcatggtggttggagatgaattaaagattcctattcgttcttggcatgatattgagaaagataatgcacgattcatgaaaaaggcaaccaagcactatgagatgcttgctaatcgaacagctgcaaatggtcactgcattgatatttatgcttgtgcccttgatcaaactggacttttggagatgaagtgttgtgcaaatcttactggaggctacatggtaatgggagattctttcaacacttctctcttcaagcagacattccaaagaatctttactaaagattttaatggagatttccgaatggcatttggtgctactttggacgtaaagacctctcgggaactgaagattgcaggagccattggtccatgcgtatctctgaatgtgaaaggaccgtgtgtgtcagaaaatgagcttggtgttggtggcacgagtcagtggaaaatctgtggcctagatcctacatctacacttggcatctattttgaagttgtcaatcagcacaacaccccgatcccccaaggaggcagaggagccatccagtttgtcacgcattatcagcactccagcacccagagacgcatccgcgtgaccaccatcgcccgaaattgggcagatgtacagagtcagctcaggcacatagaagcagcatttgaccaggaggctgcggcagtgttgatggcacggcttggggtgttccgagcggagtcagaggaggggcccgatgtgctccggtggctggaccgacaactcatccgactgtgtcaaaagtttggacagtataacaaagaagaccccacttcttttaggttatcagattccttttctctatatcctcagtttatgttccatctgagaagatctccatttcttcaagtgtttaacaacagtcctgatgagtcgtcatattacagacatcattttgcccggcaggacctgacccagtccctcatcatgatccagcccattctctactcttactcctttcatgggccaccagagccagtactcttggatagcagcagcattctagctgacagaattttgctgatggatactttctttcaaattgtcatttatcttggtgagaccatagcccagtggcgtaaagctggctaccaggacatgcccgagtatgaaaacttcaagcaccttctgcaggcaccactggatgatgctcaagaaattctgcaagcacgcttcccgatgccacgttacatcaacacggagcatggaggcagtcaggctcgattccttttgtccaaagtgaacccatctcagacacacaataacctgtatgcttggggacaggaaactggagcacccatcctaactgatgatgttagcctgcaggtgttcatggaccatttgaagaagctggctgtctccagtgcctgttaa

SEQ ID NO: 543 - DNA, 1533 bp, Homo Sapiens
atggacgggttttatgatcagcaagtcccttttatggtcccagggaaatctcgatctgaggaatgcagagggcggcctgtgattgacagaaagaggaagtttttggacacagatctggctcacgattctgaagagctatttcaggatctcagtcaacttcaagaggcttggttagctgaagcacaagttcctgatgatgaacagtttgtcccagattttcagtctgataacctggtgcttcatgccccacctccaaccaagatcaaacgggagctgcacagcccctcctctgagctgtcgtcttgtagccatgagcaggctcttggtgctaactatggagaaaagtgcctctacaactattgtgcctatgataggaagcctccctctgggttcaagccattaacccctcctacaacccccctctcacccacccatcagaatcccctatttcccccacctcaggcaactctgcccacctcagggcatgcccctgcagctggcccagttcaaggtgtgggccccgcccccgccccccattcgcttccagagcctggaccacagcagcaaacatttgcggtcccccgaccaccacatcagcccctgcagatgccaaagatgatgcctgaaaaccagtatccatcagaacagagatttcagagacaactgtctgaaccctgccaccccttccctcctcagccaggagttcctggagataatcgccccagttaccatcggcaaatgtcagaacctattgtccctgcagctcccccgccccctcagggattcaaacaagaataccatgacccactctatgaacatggggtcccgggcatgccagggcccccagcacacgggttccagtcaccaatgggaatcaagcaggagcctcgggattactgcgtcgattcagaagtgcctaactgccagtcatcctacatgagagggggttatttctccagcagccatgaaggtttttcatatgaaaaagatccccgattatactttgacgacacttgtgttgtgcctgagagactggaaggcaaagtcaaacaggagcctaccatgtatcgagaggggcccccttaccagaggcgaggttcccttcagctgtggcagttcctggtcacccttcttgatgacccagccaatgcccacttcattgcctggacaggtcgaggcatggagttcaagctgatagaaccggaagaggttgctcggcgctggggcatccagaagaaccggccagccatgaactatgacaagctgagccgctctctccgctattactatgaaaagggcatcatgcagaaggtggctggagagcgatacgtctacaaatttgtctgtgacccagatgccctcttctccatggctttcccggataaccagcgtccgttcctgaaggcagagtccgagtgccacctcagcgaggaggacaccctgccgctgacccactttgaagacagccccgcttacctcctggacatggaccgctgcagcagcctcccctatgccgaaggctttgcttactaa

SEQ ID NO: 544 - DNA, 1281 bp, Homo Sapiens
atgcccttgctttggctgagaggatttctgttggcaagttgctggattatagtgaggagttcccccaccccaggatccgaggggcacagcgcggcccccgactgtccgtcctgtgcgctggccgccctcccaaaggatgtacccaactctcagccagagatggtggaggccgtcaagaagcacattttaaacatgctgcacttgaagaagagacccgatgtcacccagccggtacccaaggcggcgcttctgaacgcgatcagaaagcttcatgtgggcaaagtcggggagaacgggtatgtggagatagaggatgacattggaaggagggcagaaatgaatgaacttatggagcagacctcggagatcatcacgtttgccgagtcaggaacagccaggaagacgctgcacttcgagatttccaaggaaggcagtgacctgtcagtggtggagcgtgcagaagtctggctcttcctaaaagtccccaaggccaacaggaccaggaccaaagtcaccatccgcctcttccagcagcagaagcacccgcagggcagcttggacacaggggaagaggccgaggaagtgggcttaaagggggagaggagtgaactgttgctctctgaaaaagtagtagacgctcggaagagcacctggcatgtcttccctgtctccagcagcatccagcggttgctggaccagggcaagagctccctggacgttcggattgcctgtgagcagtgccaggagagtggcgccagcttggttctcctgggcaagaagaagaagaaagaagaggagggggaagggaaaaagaagggcggaggtgaaggtggggcaggagcagatgaggaaaaggagcagtcgcacagacctttcctcatgctgcaggcccggcagtctgaagaccaccctcatcgccggcgtcggcggggcttggagtgtgatggcaaggtcaacatctgctgtaagaaacagttctttgtcagtttcaaggacatcggctggaatgactggatcattgctccctctggctatcatgccaactactgcgagggtgagtgcccgagccatatagcaggcacgtccgggtcctcactgtccttccactcaacagtcatcaaccactaccgcatgcggggccatagcccctttgccaacctcaaatcgtgctgtgtgcccaccaagctgagacccatgtccatgttgtactatgatgatggtcaaaacatcatcaaaaaggacattcagaacatgatcgtggaggagtgtgggtgctcatag

SEQ ID NO: 545 - DNA, 2103 bp, Homo Sapiens
atgtctcggcggacgcgctgcgaggatctggatgagctgcactaccaggacacagattcagatgtgccggagcagagggatagcaagtgcaaggtcaaatggacccatgaggaggacgagcagctgagggccctggtgaggcagtttggacagcaggactggaagttcctggccagccacttccctaaccgcactgaccagcaatgccagtacaggtggctgagagttttgaatccagaccttgtcaaggggccatggaccaaagaggaagaccaaaaagtcatcgagctggttaagaagtatggcacaaagcagtggacactgattgccaagcacctgaagggccggctggggaagcagtgccgtgaacgctggcacaaccacctcaaccctgaggtgaagaagtcttgctggaccgaggaggaggaccgcatcatctgcgaggcccacaaggtgctgggcaaccgctgggccgagatcgccaagatgttgccagggaggacagacaatgctgtgaagaatcactggaactctaccatcaaaaggaaggtggacacaggaggcttcttgagcgagtccaaagactgcaagcccccagtgtacttgctgctggagctcgaggacaaggacggcctccagagtgcccagcccacggaaggccagggaagtcttctgaccaactggccctccgtccctcctaccataaaggaggaggaaaacagtgaggaggaacttgcagcagccaccacatcgaaggaacaggagcccatcggtacagatctggacgcagtgcgaacaccagagcccttggaggaattcccgaagcgtgaggaccaggaaggctccccaccagaaacgagcctgccttacaagtgggtggtggaggcagctaacctcctcatccccgctgtgggttctagcctctctgaagccctggacttgatcgagtcggaccctgatgcttggtgtgacctgagtaaatttgacctccctgaggaaccatctgcagaggacagtatcaacaacagcctagtgcagctgcaagcgtcacatcagcagcaagtcctgccaccccgccagccttccgccctggtgcccagtgtgaccgagtaccgcctggatggccacaccatctcagacctgagccggagcagccggggcgagctgatccccatctcccccagcactgaagtcgggggctctggcattggcacaccgccctctgtgctcaagcggcagaggaagaggcgtgtggctctgtcccctgtcactgagaatagcaccagtctgtccttcctggattcctgtaacagcctcacgcccaagagcacacctgttaagaccctgcccttctcgccctcccagtttctgaacttctggaacaaacaggacacattggagctggagagcccctcgctgacatccaccccagtgtgcagccagaaggtggtggtcaccacaccactgcaccgggacaagacacccctgcaccagaaacatgctgcgtttgtaaccccagatcagaagtactccatggacaacactccccacacgccaaccccgttcaagaacgccctggagaagtacggacccctgaagcccctgccacagaccccgcacctggaggaggacttgaaggaggtgctgcgttctgaggctggcatcgaactcatcatcgaggacgacatcaggcccgagaagcagaagaggaagcctgggctgcggcggagccccatcaagaaagtccggaagtctctggctcttgacattgtggatgaggatgtgaagctgatgatgtccacactgcccaagtctctatccttgccgacaactgccccttcaaactcttccagcctcaccctgtcaggtatcaaagaagacaacagcttgctcaaccagggcttcttgcaggccaagcccgagaaggcagcagtggcccagaagccccgaagccacttcacgacacctgcccctatgtccagtgcctggaagacggtggcctgcggggggaccagggaccagcttttcatgcaggagaaagcccggcagctcctgggccgcctgaagcccagccacacatctcggaccctcatcttgtcctga

SEQ ID NO: 546 - DNA, 1545 bp, Homo Sapiens
atggcacgtttaacaaaaagacgacaggcggatacaaaagctatccagcatctttgggcagccattgagattatacggaaccagaagcagattgccaacattgaccgtattacaaagtatatgtctcgagtccacggtatgcaccctaaagagaccacccgtcagctgagcttagctgtgaaagatggtcttattgtcgaaactctaacagtgggctgcaaaggttcaaaagctggtattgaacaagaaggatattggttgccaggagatgagattagcattaagaagaagaatacaaacaaacaggagatgggcacatacctcagattcattgtctcccgcatgaaggagagggctatagatcttaataaaaaggggaaggacaataaacacccgatgtacaggaggctggtgcactcagctgtggacgttcccaccattcaagagaaagtgaatgaagggaaataccgaagttatgaagagttcaaagctgatgcccaattgcttctccacaataccgtgattttctatggagcagacagtgagcaagctgacattgcgaggatgctatataaagacacatgtcatgagctggatgaactgcagctttgcaagaattgcttttacttgtcaaatgctcgtcctgacaactggttctgttatccttgtatacctaatcatgagctggtttgggctaaaatgaaaggttttgggttttggccagccaaagtcatgcagaaagaagacaatcaagtcgacgttcgcttctttggccaccaccaccagagggcctggattccttctgaaaacattcaagatatcacagtcaacattcatcggctgcacgtgaagcgcagtatgggttggaaaaaggcctgtgatgagctggagctgcatcagcgtttcctacgagaagggagattttggaaatctaagaatgaggaccgaggtgaggaagaggcagaatccagtatctcctccaccagtaatgagcagctaaaggtcactcaagaaccaagagcaaagaaaggacgacgtaatcaaagtgtggagcccaaaaaggaagaaccagagcctgaaacagaagcagtaagttctagccaggaaatacccacgatgcctcagcccatcgaaaaagtctccgtgtcaactcagacaaagaagttaagtgcctcttcaccaagaatgctgcatcggagcacccagaccacaaacgacggcgtgtgtcagagcatgtgccatgacaaatacaccaagatcttcaatgacttcaaagaccggatgaagtcggaccacaagcgggagacagagcgtgttgtccgagaagctctggagaagctgcgttctgaaatggaagaagaaaagagacaagctgtaaataaagctgtagccaacatgcagggtgagatggacagaaaatgtaagcaagtaaaggaaaagtgtaaggaggaatttgtagaagaaatcaagaagctggcaacacagcacaagcaactgatttctcagaccaagaagaagcagtgggtaaataccagtcttttttag

SEQ ID NO: 547 - DNA, 1110 bp, Homo Sapiens
atggccgactctgcacaggcccagaagctggtgtacctggtcacagggggctgtggcttcctgggagagcacgtggtgcgaatgctgctgcagcgggagccccggctcggggagctgcgggtctttgaccaacacctgggtccctggctggaggagctgaagacagggcctgtgagggtgactgccatccagggggacgtgacccaggcccatgaggtggcagcagctgtggccggagcccatgtggtcatccacacggctgggctggtagacgtgtttggcagggccagtcccaagaccatccatgaggtcaacgtgcagggtacccggaacgtgatcgaggcttgtgtgcagaccggaacacggttcctggtctacaccagcagcatggaagttgtggggcctaacaccaaaggtcaccccttctacaggggcaacgaagacaccccatacgaagcagtgcacaggcacccctatccttgcagcaaggccctggccgagtggctggtcctggaggccaacgggaggaaggtccgtggggggctgcccctggtgacgtgtgcccttcgtcccacgggcatctacggtgaaggccaccagatcatgagggacttctaccgccagggcctgcgcctgggaggttggctcttccgggccatcccggcctctgtggagcatggccgggtctatgtgggcaatgttgcctggatgcacgtgctggcagcccgggagctggagcagcgggcaaccctgatgggcggccaggtatacttctgctacgatggatcaccctacaggagctacgaggatttcaacatggagttcctgggcccctgcggactgcggctggtgggcgcccgcccattgctgccctactggctgctggtgttcctggctgccctcaatgccctgctgcagtggctgctgcggccactggtgctctacgcacccctgctgaacccctacacgctggccgtggccaacaccaccttcaccgtcagcaccgacaaggctcagcgccatttcggctatgagcccctgttctcgtgggaggatagccggacccgtaccattctctgggtacaggccgctacgggttcagcccagtga

SEQ ID NO: 548 - DNA, 1284 bp, Homo Sapiens
atggctcccaagaaacgcccagaaacccagaagacctccgagattgtattacgccccaggaacaagaggagcaggagtcccctggagctggagcccgaggccaagaagctctgtgcgaagggctccggtcctagcagaagatgtgactcagactgcctctgggtggggctggctggcccacagatcctgccaccatgccgcagcatcgtcaggaccctccaccagcataagctgggcagagcttcctggccatctgtccagcaggggctccagcagtcctttttgcacactctggattcttaccggatattacaaaaggctgccccctttgacaggagggctacatccttggcgtggcacccaactcaccccagcaccgtggctgtgggttccaaagggggagatatcatgctctggaattttggcatcaaggacaaacccaccttcatcaaagggattggagctggagggagcatcactgggctgaagtttaaccctctcaataccaaccagttttacgcctcctcaatggagggaacaactaggctgcaagactttaaaggcaacattctacgagtttttgccagctcagacaccatcaacatctggttttgtagcctggatgtgtctgctagtagccgaatggtggtcacaggagacaacgtggggaacgtgatcctgctgaacatggacggcaaagagctttggaatctcagaatgcacaaaaagaaagtgacgcatgtggccctgaacccatgctgtgattggttcctggccacagcctccgtagatcaaacagtgaaaatttgggacctgcgccaggttagagggaaagccagcttcctctactcgctgccgcacaggcatcctgtcaacgcagcttgtttcagtcccgatggagcccggctcctgaccacggaccagaagagcgagatccgagtttactctgcttcccagtgggactgccccctgggcctgatcccgcaccctcaccgtcacttccagcacctcacacccatcaaggcagcctggcatcctcgctacaacctcattgttgtgggccgatacccagatcctaatttcaaaagttgtaccccttatgaattgaggacgatcgacgtgttcgatggaaactcagggaagatgatgtgtcagctctatgacccagaatcttctggcatcagttcgcttaatgaattcaatcccatgggggacacgctggcctctgcaatgggttaccacattctcatctggagccaggaggaagccaggacacggaagtga

SEQ ID NO: 549 - DNA, 747 bp, Homo Sapiens
atggctgggatcaccaccatcgaggcggtgaagcgcaagatccaggttctgcagcagcaggcagatgatgcagaggagcgagctgagcgcctccagcgagaagttgagggagaaaggcgggcccgggaacaggctgaggctgaggtggcctccttgaaccgtaggatccagctggttgaagaagagctggaccgtgctcaggagcgcctggccactgccctgcaaaagctggaagaagctgaaaaagctgctgatgagagtgagagaggtatgaaggttattgaaaaccgggccttaaaagatgaagaaaagatggaactccaggaaatccaactcaaagaagctaagcacattgcagaagaggcagataggaagtatgaagaggtggctcgtaagttggtgatcattgaaggagacttggaacgcacagaggaacgagctgagctggcagagtcccgttgccgagagatggatgagcagattagactgatggaccagaacctgaagtgtctgagtgctgctgaagaaaagtactctcaaaaagaagataaatatgaggaagaaatcaagattcttactgataaactcaaggaggcagagacccgtgctgagtttgctgagagatcggtagccaagctggaaaagacaattgatgacctggaagataaactgaaatgcaccaaagaggagcacctctgtacacaaaggatgctggaccagaccctgcttgacctgaatgagatgtag

SEQ ID NO: 550 - DNA, 5499 bp, Homo Sapiens
atggaggacacacccccctcactcagctgctccgactgtcagcgccactttcccagcctcccagagctctctcggcaccgagaactgctccatccatctcccaaccaggacagtgaggaggctgacagcatccctcggccctaccgttgtcagcagtgtgggcggggctaccgtcaccccgggagcctggttaaccatcgtcggacccacgagactggccttttcccctgtaccacctgtggcaaggacttctccaatcccatggctctcaagagccatatgaggacacatgctcctgagggccgccgcaggcacaggcccccacgccccaaggaagccactccacacctccagggtgagacggtgtccactgactcctggggccaaaggcttggctctagtgaaggctgggaaaaccagacaaaacatacagaagagacacctgactgtgaatctgtacctgaccccagggcagcttcgggtacgtgggaagatctgcccaccagacaaagagaaggcttggcaagccacccaggtcctgaggatggtgcagacggctggggaccctccactaactctgccagagcccctcctctccccatcccagccagcagccttcttagcaacttggaacagtatctggctgaatcagtagtgaacttcacagggggccaggagcccacccagtcccctcctgctgaggaggagcggcggtacaaatgtagtcagtgtggcaagacctacaagcacgccgggagcctcaccaaccaccgccagagccacacgctgggcatctacccctgtgccatctgtttcaaggagttctctaacctcatggctctgaagaaccactctcgactgcatgcccagtatcggccttaccactgtccccactgcccccgtgtcttccggctcccccgggagctgctggaacaccagcagtcccatgagggtgaaaggcaggagccacgctgggaggagaaagggatgcccaccaccaatgggcacacagatgagagcagccaggaccagctccccagtgcacagatgctgaatggctctgcggagctcagcacctctggggagctggaggacagtggcctggaggaataccggcctttccgctgtggggactgtggccgtacttaccgccatgctgggagcctcatcaaccatcgaaagagccaccagacaggtgtctacccctgctcactctgttctaagcagctgttcaatgcggctgccctcaaaaaccatgtgcgggctcatcacaggcccaggcaaggagttggggaaaatgggcagccatcagtcccaccagctcccctgctgctggctgagaccacccacaaagaggaagaggaccccaccaccaccctggaccatcggccctataagtgcagtgagtgtggtcgtgcttaccgccaccgggggagcctggtgaaccatcgccacagccatcggactggagagtaccagtgctcactctgtccccgcaagtaccccaatctcatggccctgcgcaaccacgtgcgggtacattgcaaggctgctcgccgaagtgcagacatcggggctgagggtgcccccagccacctcaaggtagaactcccgcctgacccagtggaggcagaggcagccccgcacacagatcaggaccatgtgtgcaaacatgaagaagaggccacggacatcaccccagcagcagacaagacagcagcacatatctgtagcatctgtgggctgctctttgaagacgctgagagccttgaacgtcatggcctgactcatggggcaggggaaaaggaaaatagcagaacagagaccacaatgtcacctcctagggcctttgcctgccgagactgtggaaagagctatcgccactcaggcagccttatcaaccacaggcagacccaccagacaggagacttcagttgtggggcctgtgccaagcacttccacaccatggctgccatgaagaaccacttgcgccggcacagtcggcggcggagcaggcggcatcggaagcgggctggcggtgccagcggtgggagagaagccaaactcctggcagcggagagctggacccgggagctagaagacaatgaaggcctggagtctccccaagacccttcaggggaaagtcctcatggggctgaaggcaacctggaaagtgatggggactgtttgcaggctgaatctgaaggggacaaatgtgggcttgagagggatgagacccatttccagggtgataaagagagcggaggcactggggaaggactggaaaggaaggatgccagtttacttgacaacttggacatcccaggtgaggaaggtggtggcactcacttctgcgatagcctcactggggtggatgaagaccagaagccagccactggccaacccaactcctcttcccactctgccaatgctgtcactggctggcaggctggggccgctcacacatgctctgactgtgggcattctttcccccatgccactggcctgctgagccacaggccctgccacccaccaggcatctatcagtgctccctctgcccgaaggagtttgactctctgcctgccctccgcagccacttccagaaccataggcctggggaggcgacctcagcacagcctttcctctgctgcctctgtggcatgatcttccctgggcgggctggctacaggcttcaccggcgccaggcccacagctcctctggcatgactgagggctcagaggaggagggggaagaggaaggagtggcagaggcagcccctgcacgcagtccaccactgcagctctcggaagcagagctgctgaatcagctgcagcgggaggtggaagcgctggacagtgcagggtatgggcacatctgtggctgctgtggtcagacctacgatgacctggggagcctggagcgtcaccaccaaagtcagagttctgggactactgcagacaaggctcccagccccttgggagtggcaggtgatgccatggagatggtcgtggacagtgtcttggaggacatagtgaattctgtctctggagagggtggagatgccaagtctcaagagggagcaggcacccccttgggagacagcctctgcatccagggtggggaaagtttgttggaggctcagccccgccccttccgctgcaaccagtgtggcaagacctatcgccatgggggcagcctggtgaaccaccgcaagatccaccagactggagactttctctgccctgtctgctcccgctgctaccccaacctggctgcctaccgtaatcatctgcggaaccaccctcgctgcaaaggctctgagccccaggttgggcccatcccagaggcagcaggtagcagtgagctgcaggttgggcccatcccagaaggaggcagcaacaagccccagcacatggcagaggaggggccggggcaagcagaagtcgagaagctccaggaagaacttaaagtggagcccctggaggaagtggccagggtgaaagaagaggtgtgggaggagaccactgtgaagggggaggagatagagcccaggctggagactgccgagaagggctgccagactgaagccagctctgagcggcccttcagctgcgaggtgtgtggccgatcctacaagcacgccggcagcctcatcaaccaccggcagagccaccagaccggccactttggctgtcaggcctgctccaagggcttctcaaacctcatgtccctcaagaaccaccggcgcatccatgcagatccccgacgtttccgctgcagcgagtgtgggaaggccttccgcctgcggaaacagctggccagccaccagcgggtccacatggaacggcgtgggggtgggggcacccgaaaggcgactcgggaagatcggcccttccgctgtgggcagtgcgggcggacctatcgccacgccggcagcctcctgaaccaccggcgcagccacgagacgggccagtacagctgccccacctgccccaagacctactccaaccgcatggccctgaaggaccaccagaggctgcactcagagaatcggcggcgacgggctggacggtccaggcgcacagctgtgcgttgcgccctctgtggccgcagcttccctggccggggatctttggagcggcacctgcgggagcatgaggagacagaaagggagccagccaatggccagggaggcctggatggcacagcggccagtgaggcgaacctgactggcagccagggactagagacccaattgggtggtgctgagccagtaccccacttggaggatggagtcccaaggccaggggagcgcagtcagagccccatcagggcagcaagctcagaagccccagagccactgtcctggggtgcagggaaggcaggtgggtggccggtaggtgggggactggggaatcatagtggaggctgggttcctcagttcctaactaggtcagaggagccagaggacagtgtccacaggagtccttgccacgctggtgactgccagctcaatggacctactctgagtcacatggatagctgggacaacagagacaacagctctcagctgcagccagggagccactcctcttgcagccagtgtggcaagacttactgccagtcaggcagcctcttgaaccacaacaccaacaagacagaccgacactattgcctgctctgctccaaggagttcttaaatcctgtggccacaaagagccacagccacaaccacatagacgcccagacctttgcctgtcctgactgtggcaaagcctttgagtcccaccaggaactggccagccacctgcaggctcatgcccggggccacagccaggtgccagcccagatggaggaggccagagatcccaaagccgggactggggaggaccaggtggttctccctggtcaagggaaagcccaggaggccccatcagaaacccccagaggcccaggagagagtgtggagagagccaggggaggacaagcggtgacgtccatggcggctgaggacaaggagcggcccttccgctgcacccagtgcgggcgctcctaccgccatgctggcagcctgctgaaccaccagaaggcccacaccacagggttgtacccgtgctccctctgtcccaaacttctccctaacctgctgtctcttaagaaccacagcaggacccacacggaccccaagcgccactgctgcagcatctgtggcaaggcctttcggacagctgcccggctggagggccacgggcgggtccatgcaccccgggaggggcctttcacctgcccccattgtccccgccacttccgccgccgaatcagcttcgtgcagcaccagcagcagcaccaggaggagtggacggtggccggctccggagccccagtggcaccagtgacgggcagaggggacttgccattgccccctccacccacccccacgaccccactcctggatccttcaccccagtggcctgcagacctcagcttctccctctga

SEQ ID NO: 551 - DNA, 4071 bp, Homo Sapiens
atggacctgaaggagaagcacctgggcgagcctccctcagccctgggcctgtccacgcggaaggccctcagcgtcctgaaggagcagctggaggcagtgctggaaggacatctcagggagcggaagaagtgtctgacgtggaaggaggtgtggagaagcagcttcctccaccacagtaaccgctgctcctgcttccactggccgggggcctcactcatgctactggccgtgctgctgctgctgggctgctgcgggggacagccagccgggagccgtggggtggggctggtgaatgcctcggccttgttcctgttactgcttctcaaccttgtgctcatcgggcggcaagaccggctgaagcgtcgggaggtagagcggaggctgcgagggatcattgaccaaatccaagatgccctcagggatggcagggagatccagtggcccagtgccatgtatccagacctccacatgccttttgcgccatcctggtccttgcactgggcctacagagacggacacctggtcaacctgccagtcagcctgctggttgaaggagacatcatagctttgaggcctggccaggaatcgtttgcttctctgagggggatcaaggatgacgagcacatcgtcctggagccgggagacctcttcccccccttctcccctccaccctcaccccggggagaagtggagagagggccacagagcccccagcagcaccggcttttccgtgtccttgagacccctgtgattgacaacatcagatggtgcctggacatggccctgtcccgaccagtcactgccctggacaatgagcggttcacagtgcagtcggtgatgctacactatgctgtgcccgtggtcctggccggcttcctcatcaccaatgccctgcgcttcatcttcagtgccccgggggtcacttcctggcagtacaccctcctccagctccaggtgaatggcgtcctgcccatcctccccctgctctttccagtcctctgggttctggcaactgcctgtggagaggcccgtgtcctggcccagatgagcaaggcctcacccagctccctgctggctaagttctcagaggatactctcagcagctatacggaggctgtctcctctcaggaaatgctgcgctgcatttggggccacttcctgagggtgctcggggggacatcgccaacgctgagccacagttccagcctgctgcacagcctgggctctgtcacggtcctgtgctgtgtggacaaacaggggatcctgtcatggccaaatcccagcccagagactgtactgttcttcagcgggaaggtggagccccctcacagcagccatgaggacctcaccgatggcctatccacccgctccttctgccatcccgagccccatgaacgagacgccctcctggctggctccctgaacaacaccctgcacctttccaatgagcaggagcgtggcgactggcctggcgaggctcccaagccccccgagccctattcacaccacaaagcgcatggccgcagcaaacacccatctggctccaacgtgagcttcagcagggacaccgagggtggtgaagaagagcccagcaagacccagcctgggatggagagcgacccctacgaagcagaggactttgtgtgtgactaccacctggagatgctgagcctgtcccaggaccagcagaacccctcctgcatccagtttgatgactccaactggcagctgcacctcacctccctcaaacccctgggcctcaatgtgctgctgaacctgtgtgatgccagcgtcaccgagcgcctgtgccgattctccgaccacctgtgcaacatcgccctgcaagagagccacagcgccgtgctgcccgtccatgtgccctggggcctctgcgagcttgcccgcctcattggcttcactcctggggccaaggagcttttcaagcaggagaaccatctggcgctgtaccgcctccccagtgccgagacaatgaaggagacatcgctggggcggctctcctgtgtcaccaagcggcggcctcccctcagccacatgatcagcctcttcattaaagacaccaccaccagcacagagcagatgctgtcccatggcaccgctgatgtggtcttagaggcctgcacagacttctgggacggagctgacatctaccctctctcgggatctgacagaaagaaagtgctggacttctaccagcgagcctgcctgtctgggtattgctctgccttcgcctacaagcccatgaactgcgccctgtcctctcagctcaatggcaagtgcatcgagctggtacaggtgcccggccaaagcagcatcttcaccatgtgcgagctgcccagcaccatccccatcaagcagaacgcccgccgcagcagctggagctctgacgaagggatcggggaggtgctggagaaggaagactgcatgcaggccctgagcggccagatcttcatgggcatggtgtcctcccagtaccaggcccggctggacatcgtgcgcctcattgatgggcttgtcaacgcctgcatccgctttgtctacttctctttggaggatgagctcaaaagcaaggtgtttgcagaaaaaatgggcctggagacaggctggaactgccacatctccctcacacccaatggtgacatgcctggctccgagatccccccctccagccccagccacgcaggctccctgcatgatgacctgaatcaggtgtcccgagatgatgcagaagggctcctcctcatggaggaggagggccactcggacctcatcagcttccagcctacggacagcgacatccccagcttcctggaggactccaaccgggccaagctgccccggggtatccaccaagtgcggccccacctgcagaacattgacaacgtgcccctgctagtgccccttttcaccgactgcaccccagagaccatgtgtgagatgataaagatcatgcaagagtacggggaggtgacctgctgcctgggcagctctgccaacctgcggaacagctgcctcttcctccagagcgacatcagcattgccctggatcccctgtacccatcccgttgctcctgggagacctttggctacgccaccagcatcagcatggcccaggcctcggatggcctttctcccctgcagctgtcagggcagctcaacagcctgccctgttccctgacctttcgccaggaggagaccatcagcatcatccggcttatcgaacaggctcggcatgccacctatggcatccgtaagtgcttcctcttcctgctgcagtgccagctgactcttgtggtcatccagttcctttcttgcctggtccagctgccgccactcctgagtaccaccgacatcctgtggctgtcctgcttttgctaccctctgctcagcatctctctgctggggaagcccccccatagctccatcatgtctatggcaacggggaaaaacctccagtccattcccaagaagacccagcactacttcctgctctgcttcctgctcaagttcagcctcaccatcagctcctgcctcatctgctttggcttcacactgcagagcttctgtgacagctcccgggaccgcaacctcaccaactgctcctccgtcatgctgcccagcaacgacgacagggctccagcctggtttgaggactttgccaatggactgctgtcggctcagaagctcacggccgccctgattgtcctgcacactgtcttcatttccatcacccatgtgcatcgcaccaagcccctgtggagaaagagccccttgaccaacctctggtgggccgtgacagtgcctgtggtgctgctgggtcaggtggtccagacggctgtggacctgcagctgtggacacacagggacagccacgtccactttggcctggaggacgtgcccctgctgacatggctcctgggctgcctgtccctggtccttgtggtggtgaccaatgagatcgtgaagctacatgagattcgggtccgagtccgctaccagaagcgacagaagctgcagtttgaaactaagctgggcatgaactctcccttctga

SEQ ID NO: 552 - DNA, 624 bp, Homo Sapiens
atggagaatcgagctctggatccagggactcgggactcctatggtgccaccagccacctccccaacaagggggccctggcgaaggtcaagaacaacttcaaagacttgatgtccaaactgacggagggccagtatgtgctgtgccggtggacagatggcctgtactacctcgggaagatcaagagggtcagcagctctaagcaaagctgcctcgtgactttcgaagataattccaaatactgggtcctatggaaggacatacagcatgccggtgttccaggagaggagcccaagtgcaacatctgcctagggaagacatcagggccgctgaatgagatcctcatctgcgggaagtgtggcctgggttaccaccagcagtgccacatccccatagcgggcagtgctgaccagcccctgctcacaccttggttctgccgacgctgcatcttcgcactggctgtgcgggtgagccttccatcctccccagtccctgcctctcctgcctcctccagtggggcagaccagagactcccatcacagagtctgagctccaagcagaagggccacacctgggctttggagacagatagcgcctctgccactgtccttggccaggatttgtag

SEQ ID NO: 553 - DNA, 4011 bp, Homo Sapiens
atggcgccgaggtgcccctggccatggccgcggcggcggcgcctcctggacgtgctcgcgcccctggtcctgctgctcggggtccgcgcggcctccgcggagccagagcgcatcagcgaggaggtggggctgctgcagctccttggggaccccccgccccagcaggtcacccagacggatgaccccgacgtcgggctggcctacgtctttgggccagatgccaacagtggccaagtggcccggtaccacttccccagcctcttcttccgtgacttctcactgctgttccacatccggccagccacagagggcccaggggtgctgttcgccatcacggactcggcgcaggccatggtcttgctgggcgtgaagctctctggggtgcaggacgggcaccaggacatctccctgctctacacagaaccaggtgcaggccagacccacacagccgccagcttccggctccccgccttcgtcggccagtggacacacttagccctcagtgtggcaggtggctttgtggccctctacgtggactgtgaggagttccagagaatgccgcttgctcggtcctcacggggcctggagctggagcctggcgccgggctcttcgtggctcaggcggggggagcggaccctgacaagttccagggggtgatcgctgagctgaaggtgcgcagggacccccaggtgagccccatgcactgcctggacgaggaaggcgatgactcagatggggcatccggagactctggcagcgggctcggggacgcccgggagcttctcagggaggagacgggcgcggccctaaaacccaggctccccgcgccaccccccgtcaccacgccacccttggctggaggcagcagcacggaagattccagaagtgaagaagtcgaggagcagaccacggtggcttcgttaggagctcagacacttcctggctcagattctgtctccacgtgggacgggagtgtccggacccctgggggccgcgtgaaagagggcggcctgaaggggcagaaaggggagccaggtgttccgggcccacctggccgggcaggccccccaggatccccatgcctacctggtcccccgggtctcccgtgcccagtgagtcccctgggtcctgcaggcccagcgttgcaaactgtccccggaccacaaggacccccagggcctccggggagggacggcacccctggaagggacggcgagccgggcgaccccggtgaagacggaaagccgggcgacaccgggccacaaggcttccccgggactccaggggacgtaggtcccaagggcgacaagggagaccctggggttggagagagagggcccccaggaccccaagggcctccagggcccccaggaccctccttcagacacgacaagctgaccttcattgacatggagggatctggcttcgggggcgatctggaggccctgcggggtcctcgaggcttccctggacctcccggaccccccggtgtcccaggcctgcccggcgagccaggccgctttggggtgaacagctccgacgtcccaggacccgccggccttcctggtgtgcctgggcgcgagggtccccccgggtttcctggcctcccgggacccccaggccctccgggaagagaggggcccccaggaaggactgggcagaaaggcagcctgggtgaagcaggcgccccaggacataaggggagcaagggagcccccggtcctgctggtgctcgtggggagagcggcctggcaggagcccccggacctgctggaccaccaggcccccctgggccccctgggcccccaggaccaggactccccgctggatttgatgacatggaaggctccggggggcccttctggtcaacagcccgaagcgctgatgggccacagggacctcccggcctgccgggacttaagggggatcctggcgtgcctgggctgccgggggcgaagggagaagttggagcagatggagtccccgggttccccggcctccctggcagagagggcattgctgggccccaggggccaaagggagacagaggcagccggggagaaaagggagatccagggaaggacggagtcgggcagccgggcctccctggcccccccggacccccgggacctgtggtctacgtgtcggagcaggacggatccgtcctgagcgtgccgggacctgagggccggccgggtttcgcaggctttcccggacctgcaggacccaagggcaacctgggctctaagggcgaacgaggctccccgggacccaagggtgagaagggtgaaccgggcagcatcttcagccccgacggcggtgccctgggccctgcccagaaaggagccaagggagagccgggcttccgaggacccccgggtccatacggacggccggggtacaagggagagattggctttcctggacggccgggtcgccccgggatgaacggattgaaaggagagaaaggggagccgggagatgccagccttggatttggcatgaggggaatgcccggccccccaggacctccagggcccccaggccctccagggactcctgtttacgacagcaatgtgtttgctgagtccagccgccccgggcctccaggattgccagggaatcagggccctccaggacccaagggcgccaaaggagaagtgggcccccccggaccaccagggcagtttccgtttgactttcttcagttggaggctgaaatgaagggggagaagggagaccgaggtgatgcaggacagaaaggcgaaaggggggagcccgggggcggcggtttcttcggctccagcctgcccggcccccccggccccccaggcccacgtggctaccctgggattccaggtcccaagggagagagcatccggggccagcccggcccacctggacctcagggaccccccggcatcggctacgaggggcgccagggccctcccggccccccaggccccccagggcccccttcatttcctggccctcacaggcagactatcagcgttcccggccctccgggcccccctgggccccctgggccccctggaaccatgggcgcctcctcaggggtgaggctctgggctacacgccaggccatgctgggccaggtgcacgaggttcccgagggctggctcatcttcgtggccgagcaggaggagctctacgtccgcgtgcagaacgggttccggaaggtccagctggaggcccggacaccactcccacgagggacggacaatgaagtggccgccttgcagccccccgtggtgcagctgcacgacagcaacccctacccgcggcgggagcacccccaccccaccgcgcggccctggcgggcagatgacatcctggccagcccccctcgcctgcccgagccccagccctaccccggagccccgcaccacagctcctacgtgcacctgcggccggcgcgacccacaagcccacccgcccacagccaccgcgacttccagccggtgctccacctggttgcgctcaacagccccctgtcaggcggcatgcggggcatccgcggggccgacttccagtgcttccagcaggcgcgggccgtggggctggcgggcaccttccgcgccttcctgtcctcgcgcctgcaggacctgtacagcatcgtgcgccgtgccgaccgcgcagccgtgcccatcgtcaacctcaaggacgagctgctgtttcccagctgggaggctctgttctcaggctctgagggtccgctgaagcccggggcacgcatcttctcctttgacggcaaggacgtcctgaggcaccccacctggccccagaagagcgtgtggcatggctcggaccccaacgggcgcaggctgaccgagagctactgtgagacgtggcggacggaggctccctcggccacgggccaggcctcctcgctgctggggggcaggctcctggggcagagtgccgcgagctgccatcacgcctacatcgtgctctgcattgagaacagcttcatgactgcctccaagtag

SEQ ID NO: 554 - DNA, 990 bp, Homo Sapiens
atgtgggggctcaaggttctgctgctacctgtggtgagctttgctctgtaccctgaggagatactggacacccactgggagctatggaagaagacccacaggaagcaatataacaacaaggtggatgaaatctctcggcgtttaatttgggaaaaaaacctgaagtatatttccatccataaccttgaggcttctcttggtgtccatacatatgaactggctatgaaccacctgggggacatgaccagtgaagaggtggttcagaagatgactggactcaaagtacccctgtctcattcccgcagtaatgacaccctttatatcccagaatgggaaggtagagccccagactctgtcgactatcgaaagaaaggatatgttactcctgtcaaaaatcagggtcagtgtggttcctgttgggcttttagctctgtgggtgccctggagggccaactcaagaagaaaactggcaaactcttaaatctgagtccccagaacctagtggattgtgtgtctgagaatgatggctgtggagggggctacatgaccaatgccttccaatatgtgcagaagaaccggggtattgactctgaagatgcctacccatatgtgggacaggaagagagttgtatgtacaacccaacaggcaaggcagctaaatgcagagggtacagagagatccccgaggggaatgagaaagccctgaagagggcagtggcccgagtgggacctgtctctgtggccattgatgcaagcctgacctccttccagttttacagcaaaggtgtgtattatgatgaaagctgcaatagcgataatctgaaccatgcggttttggcagtgggatatggaatccagaagggaaacaagcactggataattaaaaacagctggggagaaaactggggaaacaaaggatatatcctcatggctcgaaataagaacaacgcctgtggcattgccaacctggccagcttccccaagatgtga

SEQ ID NO: 555 - DNA, 5367 bp, Homo Sapiens
atgaaaagaaaagaaagaattgccaggcgcctggaagggattgaaaatgacactcagcccatcctcttgcagagctgcacaggattggtgactcaccgcctgctggaggaagacacccctcgatacatgagagccagcgaccctgccagcccccacatcggccgatcaaatgaagaggaggaaacttctgattcttctctagaaaagcaaactcgatccaaatactgcacagaaacctccggtgtccacggtgactcaccctatggttcgggtaccatggacacccacagtctggagtccaaagccgaaagaattgcaaggtacaaagcagaaagaaggcgacagctggcagagaagtatgggctgactctggatcccgaggccgactccgagtatttatcccgctataccaagtccaggaaggagcctgatgctgtcgagaagcggggaggaaaaagtgacaaacaggaagagtcaagcagagatgctagttctctgtaccccgggaccgagacgatggggctcaggacctgtgccggtgaatccaaggactatgccctccatgtgggtgacggctcttccgacccggaggtgctgctgaacatagaaaaccaaagacgaggtcaagagctgagtgccacccggcaggcccatgacctgtccccagcagccgagagttcctcgaccttctctttctctgggcgagactcctccttcactgaagtgccacggtcccccaagcacgcccacagctcctccctgcagcaggcagcctcccggagcccctcctttggtgacccacagctatcccctgaggcccgacccaggtgcacttcacattcagaaacgccaactgtcgatgatgaagaaaaggtggatgaacgagccaagctgagcgtcgccgccaagaggttgcttttcagggagatggaaaaatcttttgatgaacaaaatgttccaaagcgacgctcaagaaacacagctgtggagcagaggctacgccgtctgcaggacaggtccctcacccagcccatcaccactgaagaggtggtcatcgcagccacattgcaggcctctgctcaccaaaaggccttagccaaggaccagacaaatgagggcaaagagcttgctgagcaaggagaacctgattcctccactctaagcttggccgaaaagttggccttgtttaacaaattgtcccagccagtctcaaaagcgatttctacccggaacagaatagacacgagacagaggagaatgaacgctcgctatcaaactcagccagtcacactgggagaggtggagcaggtgcagagtggaaagctcattcctttctcacctgccgtgaacacatcagtgtctaccgtagcatccacggttgctccaatgtatgccggagatcttcgcacaaagccacctcttgaccacaatgcaagtgccactgactataagttttcttcttcaatagaaaattcggactctccagttagaagcattctgaaatcgcaagcttggcagcctttggtagagggtagcgagaacaagggaatgttgagagaatatggagagacagaaagcaagagagctttgacaggtcgagacagtgggatggagaagtatgggtcctttgaggaagcagaagcatcctaccccatcctgaaccgagccagggaaggagacagccataaggaatctaaatatgctgttcccagaagaggaagcctggaacgggcgaaccctcccatcacccacctcggggatgaaccgaaggaattttccatggctaaaatgaatgcacaaggaaacttggacttgagggacaggctgccctttgaagagaaggtggaggtggagaatgttatgaaaaggaagttttcactaagagcggcagagttcggggagcccacttccgagcagacggggacagctgctgggaaaactattgctcaaaccacagcccccgtgtcctggaagccccaggattcttcggaacagccacaggagaagctctgcaagaatccatgtgcgatgtttgctgctggagagatcaaaacgccgacaggggagggccttcttgactcacccagcaaaaccatgtctattaaagaaagattggcactgttgaagaaaagcggggaggaagattggagaaacagactcagcaggaggcaggagggcggcaaggcgccggccagcagcctgcacacccaggaagcagggcggtccctcatcaagaagcgggtcacagaaagtcgagagagccaaatgacgattgaggagaggaagcagctcatcactgtgagagaggaggcctggaagacgagaggcagaggagcggccaacgactcgacccagttcactgtggctggcaggatggtgaagaaaggtttggcgtcacctactgccataaccccagtagcctcacccatttgcggtaaaacaagaggcaccacacccgtttccaaacccctggaagatatcgaagccagaccagatatgcagttagaatcggacctgaagttggacaggctggaaacctttctaagaaggctgaataacaaagttggcgggatgcacgaaacggtgctcactgtcaccggcaaatctgtgaaggaggtgatgaagccagatgatgatgaaacctttgccaaattttaccgcagcgtggattataatatgccaagaagtcctgtggagatggatgaggacttcgatgtcattttcgatccttatgcacccaaattgacgtcttccgtggccgagcacaagcgggcagttaggcccaagcgccgggttcaggcctccaaaaaccccctgaaaatgctggcggcaagagaagatctccttcaggaatacactgagcagagattaaacgttgccttcatggagtcaaagcggatgaaagtagaaaagatgtcttccaactccaacttctcagaagtcaccctggcgggtttagccagtaaagaaaacttcagcaacgtcagcctgcggagcgtcaacctgacggaacagaactctaacaacagcgccgtgccctacaagaggctgatgctgttgcagattaaaggaagaagacatgtgcagaccaggctggtggaacctcgagcttcggcgctcaacagtggggactgcttcctcctgctctctccccactgctgcttcctgtgggtaggagagtttgcaaacgtcatagaaaaggcgaaggcctcagaacttgcaactttaattcagacaaagagggaacttggttgtagagctacttatatccaaaccattgaagaaggaattaatacacacactcatgcagccaaagacttctggaagcttctgggtggccaaaccagttaccaatctgctggagacccaaaagaagatgaactctatgaagcagccataatagaaactaactgcatttaccgtctcatggatgacaaacttgttcctgatgacgactactgggggaaaattccgaagtgctcccttctgcaacccaaagaggtactggtgtttgattttggtagtgaagtttacgtatggcatgggaaagaagtcacattagcacaacgaaaaatagcatttcagctggcaaagcacttatggaatggaacctttgactatgagaactgtgacatcaatcccctggatcctggagaatgcaatccgcttatccccagaaaaggacaggggcggcccgactgggcgatatttgggagacttactgaacacaatgagacgattttgttcaaagagaagtttctggattggacggaactgaagagatcgaatgagaagaaccccggggaacttgcccagcacaaggaagaccccaggactgatgtcaaggcatacgatgtgacacggatggtgtccatgccccagacgacagcaggcaccatcctggacggagtgaacgtcggccgtggctatggcctggtggaaggacacgacaggaggcagtttgagatcaccagcgtttccgtggatgtctggcacatcctggaattcgactatagcaggctccccaaacaaagcatcgggcagttccatgagggggatgcctatgtggtcaagtggaagttcatggtgagcacggcagtgggaagtcgccagaagggagagcactcggtgagggcagccggcaaagagaagtgcgtctacttcttctggcaaggccggcactccaccgtgagtgagaagggcacgtcggcgctgatgacggtggagctggacgaggaaaggggggcccaggtccaggttctccagggaaaggagcccccctgtttcctgcagtgtttccagggggggatggtggtgcactcggggaggcgggaagaggaagaagaaaatgtgcaaagtgagtggcggctgtactgcgtgcgtggagaggtgcccgtggaagggaatttgctggaagtggcctgtcactgtagcagcctgaggtccagaacttccatggtggtgcttaacgtcaacaaggccctcatctacctgtggcacggatgcaaagcccaggcccacacgaaggaggtcggaaggaccgctgcgaacaagatcaaggaacaatgtcccctggaagcaggactgcatagtagcagcaaagtcacaatacacgagtgtgatgaaggctccgagccactcggattctgggatgccttaggaaggagagacaggaaagcctacgattgcatgcttcaagatcctggaagttttaacttcgcgccccgcctgttcatcctcagcagctcctctggggattttgcagccacagagtttgtgtaccctgcccgagccccctctgtggtcagttccatgcccttcctgcaggaagatctgtacagcgcgccccagccagcacttttccttgttgacaatcaccacgaggtgtacctctggcaaggctggtggcccatcgagaacaagatcactggttccgcccgcatccgctgggcctccgaccggaagagtgcgatggagactgtgctccagtactgcaaaggaaaaaatctcaagaaaccagcccccaagtcttaccttatccacgctggtctggagcccctgacattcaccaatatgtttcccagctgggagcacagagaggacatcgctgagatcacagagatggacacggaagtttccaatcagatcaccctcgtggaagacgtcttagccaagctctgtaaaaccatttacccgctggccgacctcctggccaggccactcccggagggggtcgatcctctgaagcttgagatctatctcaccgacgaagacttcgagtttgcactagacatgacgagggatgaatacaacgccctgcccgcctggaagcaggtgaacctgaagaaagcaaaaggcctgttctga

SEQ ID NO: 556 - DNA, 1770 bp, Homo Sapiens
atggaggctgaagagacgatggaatgccttcaggagttccctgaacatcataaaatgatcctcgaccgattgaatgaacagcgagagcaggaccggtttactgacatcaccctaattgtcgacggacaccattttaaggctcacaaggctgttttggctgcttgtagtaagttcttctacaaattctttcaggagtttacccaagaaccattggtggagatagaaggtgttagtaaaatggcctttcgccatttaattgagttcacatatacagcaaaattaatgatacaaggagaagaagaagccaatgatgtatggaaagcagcagagtttctacaaatgctagaagctatcaaagcccttgaagtcaggaacaaagaaaactcagctcccttagaggaaaataccacaggaaaaaatgaggccaaaaaaaggaagattgcagaaacttcaaatgttatcactgagtcattgccatctgcagaatcagaacctgttgaaattgaggtagagattgccgaaggcaccattgaagtggaagatgaaggcatcgaaacattagaggaagtggcttctgccaagcagtccgtaaagtacatacagagcacaggttcctctgatgattctgctctagcactgttggcagatattaccagcaagtaccgtcaaggtgacagaaaagggcagattaaagaagatggctgtccatctgaccccacgagcaaacaggagcacatgaaatcacactccactgagagtttcaagtgtgaaatatgcaataaacgatatcttcgagagagcgcatggaaacagcacctaaattgttaccaccttgaagaaggtggagtcagtaagaagcaaagaactgggaaaaaaattcatgtatgtcagtactgtgagaaacagtttgaccattttggacattttaaagaacatcttcgaaaacatacaggtgaaaaaccttttgaatgtccaaattgtcatgaacgatttgctagaaatagcactctgaaatgtcacctcactgcatgccaaactggagtaggggcaaaaaaaggaaggaagaagctctacgaatgccaggtctgcaacagtgtgtttaacagctgggaccagttcaaagatcacttggtaatacacactggagataaacccaaccattgtactttatgtgatttgtggtttatgcaaggaaatgaattaaggaggcatctcagtgatgctcacaatatttcagagcgtctagtaacggaagaagttctttcagtagaaacacgtgtgcaaactgaacctgtaacatcaatgactattatagaacaagttgggaaggtgcatgtgctaccattgcttcaggttcaggtggattcagcacaagtgactgtggaacaagtccatccagatctgctccaggacagccaggtgcacgattcacacatgagtgagcttccagagcaggtccaagtgagttatctagaagtgggccgaattcagactgaagaaggtactgaagtacatgtagaggagctgcatgttgaacgggtcaatcaaatgccagtggaagtacaaactgaacttctagaagcagatttggaccacgtgaccccagaaatcatgaaccaagaggagagagagtctagccaagcagatgctgctgaggctgccagggaagatcacgaagatgctgaggatttagagaccaagccaacagtggattctgaagcagaaaaggcagagaatgaggacagaacagctctgccagttttagaatga

SEQ ID NO: 557 - DNA, 2130 bp, Homo Sapiens
atgaagaggtgcagatcggacgagctgcagcaacaacagggcgaggaggatggagctgggctggaagatgccgcttcccacctgccgggcgcggacctccggcctggggagaccacgggtgctaactctgctggcgggccaacttcagacgccggcgctgccgcggcgcccaacccaggtccccgaagcaagcctcctgatttaaagaaaatccagcagctgtcagagggctccatgtttggccacggtctgaagcacctgttccacagccgccgtcggtctcgggaaagggagcaccagacgtctcaggattcccagcagcatcagcagcagcagggtatgtccgaccatgactccccagatgagaaggagcgctctccggagatgcatcgcgtctcctacgccatgtccctgcacgacctgcccgcccggcccaccgccttcaaccgcgtgctgcagcagatccgctcccggccctccatcaagcggggcgccagcctgcacagcagcagtgggggcggcagcagcgggagcagcagccggcgcaccaagagtagctccctggagccccagcgtggcagccctcacctgctgcgcaaggccccccaggacagcagcctggccgccatcctgcaccagcaccagtgccgtccccgctcttcctccaccaccgacactgctctgctgctggccgacggcagcaacgtgtacctcctggctgaggaggccgaaggcatcggggacaaggtcgataagggagacctggtggccctgagcctccccgccggccatggtgacaccgacggccccatcagcctggacgtgcccgatggggcaccggacccccagcggaccaaggccgccattgaccacctgcaccagaagatcctgaagatcaccgagcagatcaagattgagcaggaggctcgcgacgacaatgtggcagagtatctgaaactggccaacaacgcggacaagcagcaggtgtcacgcatcaagcaagtgttcgagaagaagaaccagaagtcagcccagaccatcgcccagctgcacaagaagctggagcactaccgccggcgcctgaaggagattgagcagaacgggccctcgcggcagcccaaggacgtgctgcgggacatgcagcaggggctgaaggacgtgggcgccaacgtgcgcgcaggcatcagcggctttgggggcggcgtggtggagggcgtcaagggcagcctctctggcctctcacaggccacccacaccgccgtggtgtccaagccccgggagtttgccagcctcatccgcaacaagtttggcagtgctgacaacatcgcccacctgaaggaccccctggaagatgggccccctgaggaggcagcccgggcactgagcggcagtgccacactcgtctccagccccaagtatggcagcgatgatgagtgctccagcgccagcgccagctcagccggggcaggcagcaactctggggctgggcctggtggggcgctggggagccctaagtccaatgcactgtatggtgctcctggaaacctggatgctctgctggaagagctacgggagatcaaggagggacagtctcacctggaggactccatggaagacctgaagactcagctgcagagggactacacctacatgacccagtgcctgcaggaggagcgctacaggtacgagcggctggaggagcagctcaacgacctgactgagcttcatcagaacgagatgacgaacctgaagcaggagctggccagcatggaggagaaggtggcctaccagtcctatgagagggcacgggacatccaggaggccgtggagtcctgcctgacccgggtcaccaagctggagctgcagcagcaacagcagcaggtggtacagctggagggcgtggagaatgccaacgcgcgggcgctgctgggcaagttcatcaacgtgatcctggcgctcatggccgtgctgctggtgttcgtgtccaccatcgccaacttcatcacgcccctcatgaagacacgcctgcgcatcaccagcaccaccctcctggtcctcgtcctgttcctcctctggaagcactgggactccctcacctacctcctggagcacgtgttgctgcccagctga

SEQ ID NO: 558 - DNA, 1686 bp, Homo Sapiens
atggccattgccacgtcgacccagctggcccgggcactgtatgacaacaccgctgagtccccccaggagctgtccttccgccgaggggatgtcctacgggtcctgcagagagagggcgctggtggactggacggctggtgcctctgctccctacacggccagcagggcattgtgcccgccaacagggtgaagctcttgcctgctggcccagcacccaagcccagcctctctcctgcgtccccagcccagcctggctcaccatatccagccccagatcacagcaatgaggaccaggaggtgtatgtggtgccgcccccagctcggccctgtccaacctcaggacctccagctggaccttgcccaccctctcctgacctcatctacaaaatccccagagctagtgggacccagctggctgctcccagagatgccttggaggtctacgatgtgccccccaccgccctccgggtgccctccagtggcccctatgactgccctgcctccttttcccaccctctgacccgggttgccccgcagccccctggagaggatgatgctccctatgatgtgcctctgaccccaaagccacctgcagagctggaaccagatctggagtgggaaggaggccgggagccggggccccccatctatgctgccccctccaacctgaaacgagcgtcagccttactcaatttgtatgaagcacccgaggaactgctggcagacggggagggcgggggcactgatgaggggatctacgatgtgcctctgctggggccagaggctcccccttctccagagccccctggagccttggcctcccatgaccaggacaccctggcccagcttctggccagaagccccccacccccacacaggccccggctcccctcagctgagagcctgtcccgccgccctctgcctgccctgcctgtccctgaggcccccagcccctccccagtgccctctcctgccccaggccggaagggcagcatccaggaccggcctctgcccccacccccaccccgcctgcctggttatggaggccccaaggtcgagggggatccagagggcagggagatggaggatgacccagcaggacaccacaatgagtacgagggcattccgatggccgaggagtatgactatgtccacctgaagggcatggacaaagctcagggatctaggcccccggatcaggcctgcacaggggatcctgaactgcccgagagggggatgccggcgccgcaggaggccctgtccccaggggagccactggttgtgtccaccggagatctgcagctcctgtacttctatgctgggcaatgccagagccactactcagccctgcaggcagccgtggcagccctgatgtccagtacccaggctaatcagcccccgcgccttttcgtgccccacagcaagagggtggtggtggctgctcatcgcctggtgtttgttggggacaccctgggccggctggcagcctctgcccctctgagagcacaggtcagggctgcaggtacagcactgggccaggcattgcgggccactgtgctggctgtcaagggagctgccctgggctacccatccagccctgccatccaagagatggtgcagtgtgtaacagaactggcagggcaggccctgcaattcactaccctgctcactagcctggctccatga

SEQ ID NO: 559 - DNA, 1443 bp, Homo Sapiens
atgactgtcacaaagatgtcctggcgtccgcaataccgtagctccaagttccggaatgtctacgggaaggtggccaaccgggagcactgcttcgatgggatccccatcaccaagaatgtgcacgacaaccacttctgtgccgtcaacacccgcttcctggccatcgtcaccgagagcgcagggggcggctccttcctcgtcatccccctggagcagacaggcaggattgaacccaactaccccaaggtctgcggccaccagggcaatgtgctggatatcaaatggaaccccttcatcgacaacatcattgcctcgtgctcggaggacacgtcggtgcggatctgggagatccccgagggcgggctgaagcggaacatgacggaggcgctcctggagctgcacgggcacagccggcgtgtggggctggtcgagtggcaccccaccaccaacaacatcctgttcagcgctggctacgactacaaggtcctcatctggaacctggatgtgggtgagccggtgaagatgattgactgccacacggatgtgatcctctgcatgtccttcaacacggacggcagcctgctcaccaccacgtgcaaggacaagaagctgcgtgtgattgagccccgctctggccgtgttctgcaggaggccaactgcaaaaaccacagagtgaaccgggtggtgttcctggggaacatgaagcggctcctcacgacaggggtctccaggtggaacacaagacagattgccctctgggaccaggaggacctctccatgcccctgatcgaagaggaaattgatgggctctctggcctcctgttccccttctatgatgctgacacccacatgctctacctggctggaaagggtgatggaaacatccggtactacgagatcagcactgagaagccctacctgagttacctcatggagttccgctccccagccccgcagaaaggcctaggggtcatgcccaagcacgggctggatgtgtcagcctgcgaggtgttccgcttctacaagctggtgactctcaagggcctgatcgagcccatctccatgatcgtgccccggaggtcagattcctaccaggaagacatttacccaatgacaccaggcacggagccagcactgaccccggatgaatggctgggaggcatcaaccgagatcccgtgctgatgtctttgaaagaaggctataagaagtcctcaaaaatggtatttaaggctcccatcaaagaaaagaagagtgttgtggtcaacggaatagatttattagaaaatgtcccacccaggacagagaatgagctccttcgaatgttcttccggcagcaggatgagattcgacggttgaaagaggagctggcccagaaggacatccgcattcggcagctccagctggaactgaaaaacttgcgcaacagccccaagaactgttag

SEQ ID NO: 560 - DNA, 690 bp, Homo Sapiens
atggcagaagacaaaaccaaaccgagtgagttggaccaagggaagtatgatgctgatgacaacgtgaagatcatctgcctgggagacagcgcagtgggcaaatccaaactcatggagagatttctcatggatggctttcagccacagcagctgtccacgtacgccctgaccctgtacaagcacacagccacggtagatggaaggaccatccttgtggacttttgggacacggcaggccaggagcggttccagagcatgcatgcctcctactaccacaaggcccacgcctgcatcatggtgtttgatgtacagaggaaagtcacctataggaacctgagcacctggtatacagagcttcgggagttcaggccagagatcccatgcatcgtggtggccaataaaattgatgcagacataaacgtgacccaaaaaagcttcaattttgccaagaagttctccctgcccctgtatttcgtctcggctgctgatggtaccaatgttgtgaagctcttcaatgatgcaattcgattagctgtgtcttacaaacagaactcccaggacttcatggatgagatttttcaggagctcgagaacttcagcttggagcaggaagaggaggacgtgccagaccaggaacagagcagcagcatcgagaccccatcagaggaggcggcctctccccacagctga

SEQ ID NO: 561 - DNA, 9111 bp, Homo Sapiens
atgcatctgcatcaggtcctcaccggagctgtcaaccctggagacaactgctactccgtgggcagcgtcggggatgtccccttcacggcatatggatcaggctgtgatattgttattttggcaaatgactttgaatgtgtacagatcattcctggtgctaagcatggaaacatccaagtcagctgtgtggagtgttctaaccaacaaggaagaattgcagcttcatatggtaatgctgtttgtatatttgagcccttgggcataaattctcataaaagaaattgtcaactcaagtgccagtggcttaaaactgggcagttttttttgagttctgtgacatacaacttagcatgggatcctcaagataatagattgttgacagcaactgattctattcagttgtgggctcctccaggagatgatattctggaagaggaggaagaaattgataatacagttcctcctgttttaaatgattggaagtgtgtctggcagtgcaaaacctcagtatctgtacatttgatggaatggtctcctgatggtgaatattttgctactgctggaaaggatgattgtcttttgaaagtgtggtatcctatgactggttggaagtcttcaattatacctcaggatcatcatgaagtaaaaaggagacagtcctctactcaattttcttttgtttacttggcacatccccgagctgtgacaggtttttcgtggcgcaaaactagcaagtatatgcccaggggttctgtctgtaatgtgttgttaacttcatgtcatgatggtgtgtgccggctctgggcagaaactttattaccagaagactgtcttttgggtgagcagatttgtgagactaccacttccagcattgccagcagcctttctcatgctggaagacacaaagacagaatacagcatgctcttgagacaatacaccatttgaaaaatttaaggaaaggacagaggaggtcatctgttcttgtaactcatgctgaattaatgcccgaccagacagcaatgcatgaagttcaaagacacatttcccaccatgcaaatgcactctgtcattttcatattgcagcaagcatcaaccctgccacagatattccaaatgtcttggttggcactgcatttaatgttgatgatggaaatgggggctttgtagttcattggttaaacaacaaggaatttcattttacatcatctacagaagtatttatgcatcaattacgaaaactttctgataagcaggtagatcatgaaaatgatgatgcagatagagaagatgaggaacattcacaggaggatagagaacggggtttacatatgaaattagaccatgatttatccctggatagagaatctgaggcaggtacaggatcatcagaacatgaagatggagaaagagaaggaagtcctagaacttactcacgacttagtgtaccaatgccactgcctacggttctgcttgatcggaagattgaaacgctgctaactgaatggaataagaatcctgatatgctttttacaatacaccctgtagatggtacctttctagtgtggcatgtgaagtatttggatgaatataatcctggaatatttagacaagttcaggtttctttttcttctcggattcctgttgcatttccctctggtgatgcaagctctcttagtaaaaatatcatgatgtatgcctgtataaatgcgacaaaagattctcaccacacgctgttacaccaggaggggatgtctgtaggcagtcctcacggatcacagccacactctagatcccacagtacacatatgaacatcttagctcccacagtaatgatgatctctaaacacatagatggttctttaaatcagtgggcagtcacttttgctgataagtctgcctttaccactgttctaactgtatctcacaaatttagatattgcggtcatcgatttcacctcaatgacctggcatgtcattcagttttaccactgttattgacatcctctcatcataatgctctattgactcctgaattagattgtcagtgggactcagacaataaattaagtagattaatggaccctgtaaaacatataaaaggttcctcgaaacaacctcttagaaatgcagcaactcgtacatttcatgacccaaatgcaatctacagtgaacttattctgtggcgtgtagacccaataggacctttgtcatacactggaggagtatcagaattggctcgaattaactctttacatacctcagcgttctctaatgtggcttggcttccaactctcattcccagttactgtctaggcacatactgcaattctgcaagtgcttgctttgttgcttctgatggcaaaaatctgagactctatcaagctgtagtggatgcaaggaaattattagatgaattgtcagacccagaatcttcaaaacttattggagaagtgtttaatattgtgagccaacagtctactgctcgacctggctgcattattgaactcgacgcaataaccaaccaatgtggctcaaatacacagttgcttcatgtgtttcaagaagacttcattataggatataaaccacataaggaagatatggagaaaaaggaaacagaaatattttttcagccatcacaaggataccgcccaccaccattttcagaaaagttctttctagtagtaattgagaaggacagcaataataactctattctgcatatgtggcaccttcatcttaaatctgtacaagcatgtttagctaaagcttcagaaggggcttcctctgagagtctactttcagtccctggacagaagaacgtagattcttctccagaaacctctcctagtgtgagccccatgccacattcttcatcaattgccaatcttcaaactgccagtaaacttattctgagttctagactggtgtatagccaaccccttgatctcccagaatcagttgaagtaataagagcaacgccttcagcaggccatctgagttcttcttcaatttatccagtgtgccttgcaccttatttagtggttacaacttgttctgacaataaagtacgcttctggaaatgttgtatggaagccaacccagagtgtaataaaagtgatgagaaagaaatttatcattggaagagatggcctttgatgaatgatgaaggagaagataatagcagtacagtgagcattgtgggaagaccagttgctgttagctgttcatacacaggtcgccttgcagtggcttataagcagcctatccaccataatggttttgtttctaaagaattttccatgcatgtttgtatatttgaatgtgaatctacaggaggatcagagtgggttttagaacaaacaattcatcttgatgatttggttaaggttgggagtgtacttgattcaagggtcagcgtcgacagtaatctgtttgtgtatagcaagtcagatgcactcttgagcaaggatagatatcttattccgaatatcaaacatttagtacatttggactgggtatcaaaagaagatggctcccacattcttacagtgggagtcggtgcgaatatcttcatgtatggaaggctttcaggaattgtgactgagcaaaccaacagtaaggatggagtagctgtcatcactttaccactaggtggtagtatcaagcaaggagttaagtcaagatgggttcttcttagatctatagacttggtatcttctgttgatggtactccttcactgcctgtttctctctcttgggtaagagatgggatattggtggtaggaatggattgtgaaatgcatgtatatgcacagtggaagcatgctgtcaaatttggagacactgaagctgatagttctaatgcagaagaggcagcaatgcaagatcattcgacctttaaatctaatatgctggcaagaaaaagtgttgttgaaggaacagctatttctgatgatgttttttgttcaccaactgtaattcaagatggtggcttatttgaggctgcacatgtactttcccctactcttccacaatatcatccaactcagctgttagaattgatggatttagggaaagtgcgaagggctaaagccattctctctcatttagtaaaatgtattgcaggtgaagtagcaatagttagagatcctgatgctggagaaggaactaagcgacatctctctcgaactattagtgtaagtggcagtacagcaaaggaaacagtcaccgtaggaaaagatggtactcgagattatactgagatagattctatccctccactaccactatatgcattacttgctgcagatcaagatacatcctacagaatttcagaagaaagtacaaagataccacagagctatgaagatcagacagtaagtcaaccagaggatcagtattcagagctgtttcaaatccaggatataccaacggatgatattgatttagagcctgaaaagagagaaaacaaatcaaaagtaataaatctttctcaatatggaccagcttactttggccaagaacatgcaagggtactttcaagtcatcttatgcactcaagtctaccaggccttacccgtttggagcagatgttccttgtagctttggctgatacagtggctactactagtactgagcttgatgaaagcagagataagagttgctcaggaagagatacattagatgagtgtggtttgagatacttgttagctatgcgcctacacacatgccttttgacatcgctgcctcctttataccgagtgcagctacttcatcaaggtgtctctacatgccattttgcctgggcttttcattctgaggctgaagaagaactgattaatatgattccagcaattcagagaggggacccccagtggtctgaattaagagctatgggcataggatggtgggtgaggaacattaacacgcttcgaagatgcattgaaaaggttgccaaagcttcttttcaaaggaacaatgatgccttagatgctgcactattctacctttcaatgaagaagaaagcagtagtgtggggtctgtttaggtcacagcatgatgaaaaaatgacaacatttttcagccacaactttaatgaagatagatggcgaaaagctgctttgaaaaatgctttttccttacttggaaaacaacgctttgaacaatcggctgcttttttcttgctagctggttcattgaaagatgccatagaggtatgtcttgaaaaaatggaagatattcagctagccatggttattgcccgtttatatgaatctgaatttgagacttcatccacttatatatccatcctaaatcagaagattttgggttgccaaaaggatggctcaggattcagttgcaaaagattacatcctgatcctttcctgcgtagtcttgcctattgggtaatgaaagattacacccgagccttggacacattactggaacaaacaccaaaggaggatgatgaacatcaagttatcatcaagtcttgtaacccggtggcatttagtttttataactaccttcgaactcatcctttgctcattcgaagaaatcttgcctcccctgaaggaactttggcaaccttaggtctcaaaactgagaagaactttgttgataaaattaacctcatagaaagaaaattattctttaccactgcaaatgctcattttaaagttggatgccctgttttagccttggaggtactctccaaaattccaaaagtaaccaaaacatctgccttatctgcaaaaaaagatcagcctgacttcatttctcacaggatggatgatgtaccttcacattcaaaagctctgagtgatggcaatggaagttctggcattgaatggtcaaatgtaacttcatcacagtatgactggagtcagccaatagtaaaagttgatgaggaacctcttaatcttgattggggtgaagatcacgacagtgccttagatgaagaggaagacgatgctgttggtttagtgatgaaaagtacagatgccagggaaaaagataaacaatcagatcagaaggcctcagaccctaacatgttattaacacctcaggaagaggatgatcctgaaggtgatactgaagttgatgtgattgctgaacaactaaaattcagagcttgtttaaagatccttatgactgaattaagaacattggctacaggttatgaagtagatggaggaaaactcagatttcaactctataactggcttgaaaaggaaattgctgccttgcatgagatatgtaatcatgaatcagttattaaagagtattccagtaagacatattccaaagtagagagtgatctgctggatcaggaagaaatggtagacaaaccagatattggttcctatgagcgccatcaaatagaaagaagaagattgcaggccaaacgagagcatgcagaaagacgaaagtcgtggttgcagaaaaaccaagatctcctgagagtatttctcagctactgtagccttcatggggcccaaggtggtggtttggcttcagtaaggatggaactcaaatttttgctacaagaatcacaacaggaaactacagtaaagcagctccagtctccactaccactgcctaccaccctacctctgctttcagcaagtattgcgtcaacaaaaacagtcatagctaatcctgtattgtacttaaataatcacatccatgatatactttatactattgttcagatgaaaacaccacctcatcccagtattgaagatgtgaaggtgcacacacttcattcactagcagcatcactttctgcatcaatttaccaagcattatgtgacagtcatagctacagtcaaacagaaggaaatcagtttacaggaatggcttatcaaggacttcttttaagtgatcgtagaagactaaggacagaaagcattgaagaacacgcaacaccaaattcatctcctgctcaatggcctggtgtgagctcacttattaatcttttgagttcagcccaagatgaagaccagccaaaactgaacattttgctatgtgaagctgttgttgctgtttacttaagtttattgatacatgctcttgccacaaattcctccagtgaattatttcggcttgcagcccacccattaaataatcgaatgtgggctgctgtttttggaggcggtgtaaaacttgttgtgaaacctcgaagacaatcagaaaatatttcagcacctcctgtcctttctgaagacatagataaacaccgtaggagatttaacatgagaatgctcgtccctggaaggcctgtaaaagatgctaccccaccaccggtgcctgcagaaagaccatcttacaaagaaaaatttattcctcccgaacttagtatgtgggattattttgttgcaaagccatttcttcctttgtctgatagtggtgttatatatgattctgatgaaagcattcatagtgatgaagaagatgatgcctttttttcagatacacaaatacaggagcaccaagatccaaattcctatagctgggctcttctacatttgacaatggttaaactagcacttcacaatgtcaagaatttctttcctattgctggactggaattctctgagctgcctgtaacatcaccattaggtattgctgtgattaaaaacttggagaactgggaacagatcttgcaagagaaaatggatcagtttgaaggtccaccccctaactatatcaacacatatccaactgacctttcagtgggagctggaccagctattcttcgaaataaagcaatgctagaacctgaaaataccccattcaagtcccgggattcttctgcatttccagtcaaacgactttggcatttccttgttaaacaagaggtccttcaagagacatttattagatatattttcactaagaaaagaaagcagagtgaggttgaagctgatctgggctatccaggtggaaaggcgaaagtcatccataaggaatctgatatgatcatggcattttctgttaataaggcaaattgtaatgaaattgttttggcttcaacacatgatgttcaagaacttgatgttacttctctactggcctgtcagtcatacatatggatcggagaagaatatgacagagaatccaaaagttcagatgatgttgattatcgtggttccactacaactctttatcaacccagtgcaacatcctattcagcaagtcaggtgcatccaccttcatctctgccatggctgggcactggacagactagcactggagctagtgtgcttatgaaaaggaatctacataatgttaagagaatgacttcacacccagtccatcaatactatcttacaggtgctcaggacggcagtgtacgaatgtttgaatggacgcggcctcagcaacttgtctgctttcgtcaagctggcaatgcaagagttactagattatattttaattcacaaggcaacaagtgtggtgttgcggatggagagggttttctgagtatctggcaagttaaccaaactgcatcaaatcctaaaccttatatgagttggcagtgccacagtaaagccacaagtgactttgcatttattacctcttcaagtctagttgccacatctggacactccaatgacaatagaaatgtttgcctctgggacacattaatatcacccggaaacagcctcattcatggtttcacgtgccacgatcatggtgccacggtactgcagtatgcacccaaacagcaactcctaatctcggggggtaggaaaggacacgtctgcatttttgacatcaggcaaaggcagctcattcacacgttccaggcccatgactcagctattaaggctctggccttggatccctatgaggaatattttaccacaggttcagcagaaggtaacataaaggtttggagattgacaggccatggcctaattcattcatttaaaagtgaacatgctaagcagtccatatttcgaaacattggggctggagtcatgcagattgacatcatccagggcaatcggctcttctcctgtggtgcagatggcacgctgaaaaccagggttttgcccaatgcttttaacatccctaacagaattcttgacattctataa

SEQ ID NO: 562 - DNA, 3528 bp, Homo Sapiens
atgagcgcagacagcagccctctcgtgggcagcacgcccaccggttatgggaccctgacgatagggacatcaatagatcccctcagctcctcagtttcatccgtgaggctcagcggctactgtggcagtccatggagggtcatcggctatcacgtcgtggtctggatgatggctgggatccctttgctgctcttccgttggaagcccctgtggggggtgcggctgcggctccggccctgcaacctggcccacgccgaaacactcgttatcgaaataagagacaaagaggatagttcctggcagctcttcactgtccaggtgcagactgaggccatcggcgagggcagcctggagccgtccccacagtcccaggcagaggatggccggagccaggcggcagttggggcggtaccagagggtgcctggaaggatacggcccagctccacaagagcgaggaggcgaagcgggtgctgcggtattacctcttccagggccagcgctatatctggatcgagacccagcaagccttctaccaggtcagcctcctggaccatggccgctcttgtgacgacgtccaccgctcccgccatggcctcagcctccaggaccaaatggtgaggaaggccatttacggccccaacgtgatcagcataccggtcaagtcctacccccagctgctggtggacgaggcactgaacccctactatgggttccaggccttcagcatcgcgctgtggctggctgaccactactactggtacgccctgtgcatcttcctcatttcctccatctccatctgcctgtcgctgtacaagaccagaaagcaaagccagactctaagggacatggtcaagttgtccatgcgggtgtgcgtgtgccggccagggggagaggaagagtgggtggactccagtgagctagtgcccggagactgcctggtgctgccccaggagggtgggctgatgccctgtgatgccgccctggtggccggcgagtgcatggtgaatgagagctctctgacaggagagagcattccagtgctgaagacggcactgccggaggggctggggccctactgtgcagagacacaccggcggcacacactcttctgcgggaccctcatcttgcaggcccgggcctatgtgggaccgcacgtcctggcagtggtgacccgcacagggttctgcacggcaaaagggggcctggtgagctccatcttgcacccccggcccatcaacttcaagttctataaacacagcatgaagtttgtggctgccctctctgtcctggctctcctcggcaccatctacagcatcttcatcctctaccgaaaccgggtgcctctgaatgagattgtaatccgggctctcgacctggtgaccgtggtggtgccacctgccctgcctgctgccatgactgtgtgcacgctctacgcccagagccgactgcggagacagggcattttctgcatccacccactgcgcatcaacctggggggcaagctgcagctggtgtgtttcgacaagacgggcaccctcactgaggacggcttagacgtgatgggggtggtgcccctgaaggggcaggcattcctgcccctggtcccagagcctcgccgcctgcctgtggggcccctgctccgagcactggccacctgccatgccctcagccggctccaggacacccccgtgggcgaccccatggacttgaagatggtggagtctactggctgggtcctggaggaagagccggctgcagactcagcatttgggacccaggtcttggcagtgatgagacccccactttgggagccccagctgcaggcaatggaggagcccccggtgccagtcagcgtcctccaccgcttccccttctcttcggctctgcagcgcatgagtgtggtggtggcgtggccaggggccactcagcccgaggcctacgtcaaaggctccccggagctggtggcagggctctgcaaccccgagacagtgcccaccgacttcgcccagatgctgcagagctatacagctgctggctaccgtgtcgtggccctggccagcaagccactgcccactgtgcccagcctggaggcagcccagcaactgacgagggacactgtggaaggagacctgagcctcctggggctgctggtcatgaggaacctactgaagccgcagacaacgccagttatccaggctctgcgaaggacccgcatccgcgccgtcatggtgacaggggacaacctgcagacagcggtgactgtggcccggggctgtggcatggtggccccccaggagcatctgatcatcgtccacgccacccaccctgagcggggtcagcctgcctctctcgagttcctgccgatggagtcccccacagccgtgaatggcgttaaggatcctgaccaggctgcaagctacaccgtggagccagacccccgatccaggcacctggccctcagcgggcccacctttggtatcattgtgaagcacttccccaagctgctgcccaaggtcctggtccagggcactgtctttgcccgcatggcccctgagcagaagacagagctggtgtgcgagctacagaagcttcagtactgcgtgggcatgtgcggagacggcgccaatgactgtggggccctgaaggcggctgatgtcggcatctcgctgtcccaggcagaagcctcagtggtctcacccttcacctcgagcatggccagtattgagtgcgtgcccatggtcatcagggaggggcgctgttcccttgacacttcgttcagcgtcttcaagtacatggctctgtacagcctgacccagttcatctccgtcctgatcctctacacgatcaacaccaacctgggtgacctgcagttcctggccatcgacctggtcatcaccaccacagtggcagtgctcatgagccgcacggggccagcgctggtcctgggacgggtgcggccaccgggggcgctgctcagcgtgcccgtgctcagcagcctgctgctgcagatggtcctggtgaccggcgtgcagctagggggctacttcctgaccctggcccagccatggttcgtgcctctgaacaggacagtggccgcaccagacaacctgcccaactacgagaacaccgtggtcttctctctgtccagcttccagtacctcatcctggctgcagccgtgtccaagggggcgcccttccgccggccgctctacaccaatgtgcccttcctggtggccctggcgctcctgagctccgtcctggtgggccttgtcctggtccccggcctcctgcaggggccgctggcgctgaggaacatcactgacaccggcttcaagctgctgctgctgggtctggtcaccctcaacttcgtgggggccttcatgctggagagcgtgctagaccagtgcctccccgcctgcctgcgccgcctccggcccaagcgggcctccaagaagcgcttcaagcagctggaacgagagctggccgagcagccctggccgccgctgcccgccggccccctgaggtag

SEQ ID NO: 563 - DNA, 1254 bp, Homo Sapiens
atggagagtaacctgtctggcctggtgcctgctgccgggctggtgcctgcgctgccacctgctgtgaccctggggctgacagctgcctacaccaccctgtatgccctgctcttcttctccgtctatgcccagctctggctggtgcttctgtatgggcacaagcgtctcagctatcagacggtgttcctggccctctgtctgctctgggccgccttgcgtaccaccctcttctccttctacttccgagatactccccgcgccaaccgcctggggcccttgcccttctggcttctctactgctgccccgtctgcctgcagttcttcaccttgacgcttatgaacctctactttgcccaggtggtgttcaaggccaaggtgaagcgtcggccggagatgagccgaggcttgctcgctgtccgaggggcctttgtgggggcctcgctgctctttctgctggtgaacgtgctgtgtgctgtgctctcccatcggcgccgggcacagccctgggccctgctgcttgtccgcgtcctggtgagcgactccctgttcgtcatctgcgcgctgtctcttgctgcctgcctctgcctcgtcgccaggcgggcgccctccactagcatctacctggaggccaaggggaccagtgtgtgccaggcggccgcgatgggtggcgccatggtcctgctctatgccagccgggcctgctacaacctgacagcactggccttggccccccagagccggctggacaccttcgattacgactggtacaatgtgtctgaccaggcggacctggtgaatgacctggggaacaaaggctacctggtatttggcctcatcctcttcgtgtgggagctactgcccaccaccctgctggtgggcttcttccgggtgcaccggcccccacaggacctgagcaccagccacatcctcaatgggcaggtctttgcctctcggtcctacttctttgaccgggctgggcactgtgaagatgagggctgctcctgggagcacagccggggtgagagcaccaggtgccaggaccaggcggccaccaccacagtctctactccaccccacagacgtgatccccctccctcccccacagaatacccaggccccagtccccctcaccctaggcccctgtgccaagtttgtctgccgcttcttgcccaggatcctgggggtcgtggctaccccctcctctggccggctccttgctgctcctgtcatagtgagcttgtgccgtccccctag

SEQ ID NO: 564 - DNA, 399 bp, Homo Sapiens
atggacgtgttccaggagggtctggctatggtggtgcaggacccgctgctctgcgatctgccgatccaggttactctggaagaagtcaactcccaaatagccctagaatacggccaggcaatgacggtccgagtgtgcaagatggatggagaagtaatgcccgtggttgtagtgcagagtgccacagtcctggacctgaagaaggccatccagagatacgtgcagctcaagcaggagcgtgaagggggcattcagcacatcagctggtcctacgtgtggaggacgtaccatctgacctctgcaggagagaaactcacggaagacagaaagaagctccgagactacggcatccggaatcgagacgaggtttccttcatcaaaaagctgaggcaaaagtga

SEQ ID NO: 565 - DNA, 2010 bp, Homo Sapiens
atggccattgtgcagactctgccagtgccactggagcctgctcctgaagctgccactgccccacaagctccagtcatgggtagtgtgagcagccttatctcaggccggccctgtcccggggggccagctcctccccgccaccacggccctcctgggcccaccttcttccgccagcaggatggcctgctacggggtggctatgaggcacaggagccgctgtgcccagctgtgccccctaggaaggctgtccctgtcaccagcttcacctacatcaatgaggacttccggacagagtcaccccccagcccaagcagtgatgttgaggatgcccgagagcagcgggcacacaatgcccacctccgcggcccaccaccaaagctcatccctgtctctggaaagctggagaagaacatggagaagatcctgatccgcccaacagccttcaagccagtgctgcccaaacctcgaggggctccgtccctgcctagcttcatgggtcctcgggccaccgggctgtctgggagccagggcagcctgacgcagctgtttgggggccctgcctcctcctcctcctcttcctcctcctcttcagctgctgacaaacccctggcatttagtggctgggccagtggctgcccatcagggacgctatccgactctggccgaaactcactgtccagcctgcccacctacagcaccggaggtgccgagccaaccaccagctccccaggcgggcacctgccttcccatggctctgggcgaggggcactgcctgggccagcccgaggggtccctactgggccctcccactcagacagtggccggtcctcctccagcaagagcacaggctccctagggggccgtgtggctggggggcttttgggcagtggtactcgggcctcccctgacagcagctcctgtggggagcgctcaccaccacccccgcctccacctccttcggatgaggccctgctgcactgtgtcctggaaggaaagctccgagaccgggaggcagagcttcagcagctgcgggacagtctggacgagaatgaggctaccatgtgccaggcatacgaggagcggcagcggcactggcagcgagagcgtgaggccctgcgagaggactgtgcggcccaggcacagcgggcacagcgggcccaacagctgctgcagctgcaggtgttccagctgcagcaggagaagcggcaattgcaggacgacttcgcacagctgctgcaggagcgcgaacagctggagcggcgctgcgccaccttggagcgggagcagcgggagctcgggccgaggcttgaggagaccaagtgggaggtgtgccagaaatcaggcgagatctccctgctgaagcagcagctgaaagagtctcaggcagagctggtgcagaagggcagcgagctggtggctctgcgggtggcgctgcgggaggcccgtgctacgctgcgggtcagtgagggccgtgcgcggggtctacaggaggccgcccgagctcgggagctggagctggaagcctgttcccaggagctgcagcgacaccgccaggaagctgagcagctgcgggagaaagctgggcagttggatgctgaggcggccggactccgggagccccctgtgccacctgccaccgctgacccattcctcctggcagagagtgatgaggccaaagtgcagcgggcagcagccggggttgggggcagcttgcgggcccaggtggagcgattgcgggtggagctgcagcgggagcggcggcggggtgaggagcagcgggacagctttgagggggagcggctggcctggcaggcagagaaggagcaggtgatccgctaccagaagcagctgcagcacaactacatccagatgtaccggcgcaaccggcagctagagcaggagctgcagcagctcagcctggagctggaggcccgggagctcgctgacctgggcctggccgagcaggccccctgcatctgcctggaggagatcactgctactgagatctag

SEQ ID NO: 566 - DNA, 1266 bp, Homo Sapiens
atgaacagaggcttctcccgaaaaagccacacattcctgcccaagatcttcttccgcaagatgtcatcctcaggggccaaggacaagcctgagctgcagtttcccttccttcaggatgaggacacagtggccacgctgctagagtgcaagacgctcttcatcttgcgcggcctgccaggaagcggcaagtccacgctggcacgggtcatcgtggacaagtaccgtgatggcaccaagatggtgtcggctgacgcttacaagatcacccccggcgctcgaggagccttctccgaggagtacaagcggctcgatgaggacctggctgcctactgccgccgccgggacatcagaattcttgtgcttgatgacaccaaccacgaacgggaacggctggagcagctctttgaaatggccgaccagtaccagtaccaggtggtgctggtggagcccaagacggcgtggcggctggactgtgcccagctcaaggagaagaaccagtggcagctgtcggctgatgacctgaagaagctgaagcctgggctggagaaggacttcctgccgctctacttcggctggttcctgaccaagaagagctctgagaccctccgcaaagccggccaggtcttcctggaagagctggggaaccacaaggccttcaagaaggagctgcgacaattcgtccctggggatgagcccagggagaagatggacttggtcacctactttggaaagagacccccaggcgtgctgcattgcacaaccaagttttgtgactacgggaaggctcccggggcagaggagtacgctcaacaagatgtgttaaagaaatcttactccaaggccttcacgctgaccatctctgccctctttgtgacacccaagacgactggggcccgggtggagttaagcgagcagcaactgcagttgtggccgagtgatgtggacaagctgtcacccactgacaacctgccgcgggggagccgcgcccacatcaccctcggctgtgcagctgacgtagaggccgtgcagacgggccttgacctcttagagattctgcggcaggagaaggggggcagccgaggcgaggaggtgggcgagctaagccggggcaagctctattccttgggcaatgggcgctggatgctgaccctggccaagaacatggaggtcagggccatcttcacggggtactacgggaaaggcaaacctgtgcccacgcaaggtagccggaaggggggcgccttgcagtcctgcaccatcatatga

SEQ ID NO: 567 - DNA, 876 bp, Homo Sapiens
atggatccaagcctgttgagagaaagggagctgttcaaaaaacgagctctttctactcctgtagtagaaaaacgttcagcatcttctgagtcatcatcatcatcgtcaaagaagaagaaaacaaaggtagaacatggaggatcgtcaggctctaaacaaaattctgatcatagcaatggatcatttaacttgaaagctttgtcaggaagctctggatataagtttggtgttcttgctaagattgtgaattacatgaagacacggcatcagcgaggagatacgcatcctctaaccttagatgaaattttggatgaaacacaacatttagatattggactcaagcagaaacaatggctaatgactgaggctttagtcaacaatcccaaaattgaagtaatagatgggaagtatgctttcaagcccaagtacaacgtgagagataagaaggccctacttaggctcttagatcagcatgaccagcgaggattaggaggaattcttttagaagacatagaagaagcactgcccaattcccagaaagctgtcaaggctttgggggaccagatactatttgtaaatcgtcccgataagaagaaaatacttttcttcaatgataagagctgtcagttttctgtggatgaagaatttcagaaactgtggaggagtgtcactgtagattccatggacgaggagaaaattgaagaatatctgaagcgacagggtatttcttccatgcaggaatctggaccaaagaaagtggcccctattcagagaaggaaaaagcctgcttcacagaaaaagcgacgctttaagactcataacgaacacttggctggagtgctgaaggattactctgacattacttccagcaaatag

SEQ ID NO: 568 - DNA, 3324 bp, Homo Sapiens
atggatggcaagcggcggccaggcccagggcccggggtgcccccaaagcgggcccgtgggggcctctgggatgatgatgatgcacctcggccatcccaattcgaggaggacctggcactgatggaggagatggaggcagaacacaggctgcaggagcaggaggaggaggagctgcagtcagtcctggagggggttgcagacgggcaggtcccaccatcagccatagatcctcgctggcttcggcccacaccaccagcgctggacccccagacagagcccctcatcttccaacagttggagattgaccattatgtgggcccagcgcagcctgtgcctggggggcccccaccatcccgcggctccgtgcctgtgctccgcgccttcggggtcaccgatgaggggttctctgtctgctgccacatccacggcttcgctccctacttctacaccccagcgccccctggtttcgggcccgagcacatgggtgacctgcaacgggagctgaacttggccatcagccgggacagtcgcggggggagggagctgactgggccggccgtgctggctgtggaactgtgctcccgagagagcatgtttgggtaccacgggcacggcccctccccgttcctgcgcatcaccgtggcgctgccgcgcctcgtggccccggcccgccgtctcctggaacagggcatccgtgtggcaggcctgggcacgcccagcttcgcgccctacgaggccaacgtcgactttgagatccggttcatggtggacacggacatcgtcggctgcaactggctggagctcccagctgggaaatacgccctgaggctgaaggagaaggctacgcagtgccagctggaggcggacgtgctgtggtctgacgtggtcagtcacccaccggaagggccatggcagcgcattgcgcccttgcgcgtgctcagcttcgatatcgagtgcgccggccgcaaaggcatcttccctgagcctgagcgggaccctgtcatccagatctgctcgctgggcctgcgctggggggagccggagcccttcctacgcctggcgctcaccctgcggccctgtgcccccatcctgggtgccaaggtgcagagctacgagaaggaggaggacctgctgcaggcctggtccaccttcatccgtatcatggaccccgacgtgatcaccggttacaacatccagaacttcgaccttccgtacctcatctctcgggcccagaccctcaaggtacaaacattccctttcctgggccgtgtggccggcctttgctccaacatccgggactcttcattccagtccaagcagacgggccggcgggacaccaaggttgtcagcatggtgggccgcgtgcagatggacatgctgcaggtgctgctgcgggagtacaagctccgctcctacacgctcaatgccgtgagcttccacttcctgggcgagcagaaggaggacgtgcagcacagcatcatcaccgacctgcagaatgggaacgaccagacccgccgccgcctggctgtgtactgcctgaaggatgcctacctgccactgcggctgctggagcggctcatggtgctggtgaacgccgtggagatggcgagggtcactggcgtgcccctcagctacctgctcagtcgtggccagcaggtcaaggtcgtatcccagctgttgcggcaggccatgcacgaggggctgctgatgcccgtggtgaagtcagagggcggcgaggactacacgggagccactgtcatcgagcccctcaaagggtactacgacgtccccatcgccaccctggacttctcctcgctgtacccgtccatcatgatggcccacaacctgtgttacaccacgctccttcggcccgggactgcacagaaactgggcctgactgaggatcagttcatcaggacccccaccggggacgagtttgtgaagacctcagtgcggaaggggctgctgccccagatcctggagaacctgctcagtgcccggaagagggccaaggccgagctggccaaggagacagaccccctccggcgccaggtcctggatggacggcagctggcgctgaaggtgagcgccaactccgtatacggcttcactggcgcccaggtgggcaagttgccgtgcctggagatctcacagagcgtcacggggttcggacgtcagatgatcgagaaaaccaagcagctggtggagtctaagtacacagtggagaatggctacagcaccagtgccaaggtggtgtatggtgacactgactccgtcatgtgccgattcggcgtgtcctcggtggctgaggcgatggccctggggcgggaggccgcggactgggtgtcaggtcacttcccgtcgcccatccggctggagtttgagaaggtctacttcccatacctgcttatcagcaagaagcgctacgcgggcctgctcttctcctcccggcccgacgcccacgaccgcatggactgcaagggcctggaggccgtgcgcagggacaactgccccctcgtggccaacctggtcactgcctcactgcgccgcctgctcatcgaccgagaccctgagggcgcggtggctcacgcacaggacgtcatctcggacctgctgtgcaaccgcatcgatatctcccagctggtcatcaccaaggagctgacccgcgcggcctccgactatgccggcaagcaggcccacgtggagctggccgagaggatgaggaagcgggaccccgggagtgcgcccagcctgggcgaccgcgtcccctacgtgatcatcagtgccgccaagggtgtggccgcctacatgaagtcggaggacccgctgttcgtgctggagcacagcctgcccattgacacgcagtactacctggagcagcagctggccaagcccctcctgcgcatcttcgagcccatcctgggcgagggccgtgccgaggctgtgctactgcggggggaccacacgcgctgcaagacggtgctcacgggcaaggtgggcggcctcctggccttcgccaaacgccgcaactgctgcattggctgccgcacagtgctcagccaccagggagccgtgtgtgagttctgccagccccgggagtctgagctgtatcagaaggaggtatcccatctgaatgccctggaggagcgcttctcgcgcctctggacgcagtgccagcgctgccagggcagcctgcacgaggacgtcatctgcaccagccgggactgccccatcttctacatgcgcaagaaggtgcggaaggacctggaagaccaggagcagctcctgcggcgcttcggaccccctggacctgaggcctggtga

SEQ ID NO: 569 - DNA, 2634 bp, Homo Sapiens
atgtgtgatttgcggcggccagcggcaggtgggatgatggacttggcctacgtctgtgagtgggagaaatggtccaagagcacccactgcccatcggtgcccctggcctgcgcctggtcctgccgaaatctcatcgccttcaccatggacctgcgcagcgatgaccaggacctgacccgcatgatccacatcctggacacggagcacccctgggacctgcactcgatcccctcagagcaccacgaggccatcacctgcctggagtgggaccagtcaggctcccggctcctgtcagcagatgccgacgggcagatcaagtgctggagcatggcggaccacctggctaatagctgggagagctcagtgggcagcctagtggagggggaccccattgtggccctgtcctggctgcacaatggtgtgaaactggccctgcacgtggagaagtcgggcgcctccagcttcggggagaagttctcccgagtcaagttctcaccgtcgctcacgctgttcggcggcaagcccatggagggctggatcgcggtgacggtcagcggcctggtcaccgtgtccctgctgaagcccagcgggcaggtgctgacgtccaccgagagcctgtgccggctgcgcggccgcgtggccctggccgacatcgccttcaccggcggcggcaacatcgtggtggccacggcggacggcagcagcgcgtcgcccgtgcagttctacaaggtgtgcgtgagcgtggtgagcgagaagtgccgtatcgacacggagatcctgccctccctgttcatgcgctgcaccaccgacctcaaccgcaaggacaagtttcccgccatcacccacctcaagttcctggcccgggacatgtcggagcaggtgcttttgtgcgcgtccagccagaccagcagcatcgtggagtgctggtccctgcgcaaggagggactccccgtgaacaacatcttccagcagatctcccccgtggttggcgacaaacagcccacaattctcaaatggcggatcctatcggccaccaacgatctggaccgtgtgtcggccgtggcgctgcccaagctgcccatctcgctcaccaacaccgacctcaaggtggccagcgacacacagttctaccctggcctcgggctggccctggccttccacgacggcagcgtccacatcgtgcaccggctctcactgcagaccatggccgtcttctacagctccgcggccccgaggcctgtggatgagccggccatgaagcgcccccgcaccgcgggccccgccgtccacttaaaggctatgcagctatcgtggacgtcactggccctggtggggattgacagccacgggaagctgagcgtgctccgcctctcaccttccatgggccacccgctggaggtggggctggcgctgcggcacctgctcttcctgctggagtactgcatggtgaccggctacgactggtgggacatcctgctgcacgtgcagcccagtatggtacagagcctggtggagaagctgcacgaggagtacacgcgccagaccgctgccctgcagcaggtcctctccacccggatcctggccatgaaggcctcgctctgcaagctgtcgccctgcacggtgacccgcgtgtgcgactaccacaccaagctcttcctcatcgccatcagctccaccctgaagtcgctgctgcgcccccactttctcaacacgcctgacaagagccccggcgaccggctgaccgagatctgcaccaagatcaccgacgtcgacattgacaaggtcatgatcaacctcaagacggaggaatttgtgctggacatgaacacactgcaggcgctgcagcagctcttgcagtgggtgggcgacttcgtgctgtacctgctggccagcctacccaaccagggttccctgctgaggccgggccacagctttctgcgggacggcacctcgctgggcatgcttcgggaattgatggtggtcatccgcatctggggccttctgaagcccagctgcctgcccgtgtatacggccacctcggatacccaggacagcatgtccctgctcttccgcctgctcaccaagctctggatctgctgtcgcgatgagggcccagcgagcgagccggacgaggcgctggtggatgaatgctgcctgctgcccagccagctgcttatccccagcctggactggctgccagccagcgacggcctggttagccgcctgcagcccaagcagccccttcgtctgcagtttggccgggcgcccacgctgcctggcagtgctgccaccctgcagctcgacggcctcgccagggccccaggccagcccaagatcgaccacctgcggaggctgcaccttggcgcttgccccacggaggaatgcaaggcctgcaccaggtgcggctgtgtcaccatgctcaagtcgcccaacagaaccacggcggtgaagcagtgggagcagcgctggatcaagaactgcctggctgttgaaggccgtgggccggacgcctgcgtgaccagcagagcttctgaggaagcccctgcctttgtccagctgggcccgcagtccacacaccactctcccaggacccccagatccctggaccatctgcatccagaggaccgtccgtga

SEQ ID NO: 570 - DNA, 3702 bp, Homo Sapiens
atgtggctgagcccggaggaggtgctggtggccaatgcgctgtgggtgacggagcgggccaaccccttcttcgtgctgcagcgacgccggggccacggcaggggcggcggccttacgggtcttctcgtgggcaccctggacgtggtgctggactccagtgcccgcgtggccccttaccgcatcctgcaccagacccaggactcccaggtctactggacagtggcgtgtggttcttcccgcaaagagatcacaaaacactgggaatggctggaaaataacttgctccagacactgtccatcttcgacagtgaggaagatatcaccaccttcgtcaagggcaagatacacggaatcatcgcagaagagaacaagaacctgcagccccagggagacgaggaccccgggaagttcaaggaggctgagctgaagatgcggaagcagtttgggatgcctgagggcgagaagctggtgaattactactcctgcagctactggaagggccgcgtgccccggcagggctggctgtacctgacggtcaaccacctgtgcttctactccttcctgctggggaaggaagtgagcctcgtggtgcagtgggtggacataacgcgtctggagaagaacgccaccctgctcttccccgagagcatccgtgtggacacccgcgaccaggagctcttcttctccatgttcctcaacatcggcgagaccttcaagctcatggagcagttggccaacctggccatgcggcagctgctggacagcgagggcttcctggaggacaaggccctgcctaggcccatccggccacacaggaacatctcagccctgaagcgagacctggacgcccgagccaagaatgagtgctaccgagccacgttccggctgcccagggatgagcggctagacggccacacaagctgcaccctgtggacgccgttcaacaagctgcacatccctggccagatgttcatctccaacaactacatctgcttcgccagcaaggaggaggacgcttgccacctcatcatacccctgagggaggtgaccattgtcgaaaaagctgacagctccagcgtgctgcccagccccctgtccatcagcaccaaaagcaaaatgacattcctgtttgccaacctgaaagaccgtgatttcttggtgcagaggatctctgacttcctccagaaaacaccatccaagcagccaggcagtatcgggagcaggaaagccagtgttgtggaccctagcacagagtcttccccagctcctcaggaggggtcggagcagcccgccagcccagcctctcccctcagcagccgccagagcttctgtgcgcaggaggcgccaaccgcatcccagggcctgctgaagctcttccagaaaaactcgcccatggaggaccttggagccaagggggccaaggagaagatgaaagaggagtcatggcacatccacttcttcgagtacgggcgtggcgtgtgcatgtaccgcacagccaagacgcgggcactggtcctgaagggtatccctgagagcctccggggagagctgtggctcctcttctccggggcctggaatgagatggtgactcaccccgggtactatgctgagctggtggagaagtccaccgggaagtacagcctggccacagaggagatcgagcgagacctgcaccgctccatgcccgagcaccctgccttccagaacgagctggggattgctgccctccggcgggtgctgactgcctatgccttccgaaaccccaccatcggctactgccaggcaatgaacatcgtgacctcggtgctcctgctctatggcagtgaggaggaggccttctggctcctggtggccctgtgcgagcgcatgctgcccgactactacaacaccagggtggtgggagccctggtggaccaaggcatcttcgaagagctcacgagagacttcctgccgcagctctcggagaagatgcaggacctgggggtgatctccagcatctcgctgtcctggttcctgaccctcttcctcagcgtcatgcccttcgagagcgccgtggtcatcgtcgactgctttttctatgagggcatcaaggtgatcctgcaggtggccctggccgtcctggacgccaacatggagcagctgctgggctgcagcgacgagggcgaggccatgaccatgctgggcagatacctggataatgtggtcaacaagcagagtgtctctcctcctatcccgcacctccgtgccttgctgagcagcagcgatgacccccctgcagaggtggacatctttgagctcctgaaagtgtcctatgagaaattcagcagcctgagggccgaagacattgagcagatgcggtttaaacagaggctgaaagtgatccagtccttggaggacacggccaagaggagtgtggtccgagctatacctgtggacattggtttctccattgaagagctggaggacctttacatggtgtttaaggccaagcacctggctagccagtactgggggtgcagccgcacaatggccggccgtcgggaccccagcctgccctacctggagcagtaccggattgatgccagccagttccgggaactctttgccagcctgacaccctgggcctgtggctcccacacacctctgctggcagggcgcatgttcaggctcctggacgaaaacaaggactcgctgatcaacttcaaggagttcgtgacagggatgagcgggatgtaccacggggacctgacagagaagctcaaggtgctctacaagctacaccttcccccagctctgagcccagaggaagccgagtcagccctggaggcggcccattatttcacagaggacagctcctcagaagaagcactaccacaggaagagcaagaaggaagtggaagtgaggagagaggagaggagaaggggaccagctctccggactatcggcactaccttcgaatgtgggccaaggagaaagaggctcagaaggagacgattaaggatcttcccaagatgaaccaggagcagttcattgagctgtgcaagacgctttacaacatgttcagtgaagaccccatggagcaggacctgtaccacgccatcgccaccgtggccagcctcctgctccgcatcggagaggtggggaagaagttctcagcccgcacaggcaggaagcccagggactgtgccactgaggaggacgagccaccagcacccgaactgcatcaggacgcagccagggagcttcagcccccagctgcaggagacccccaagccaaagcaggcggagacacacacctcggaaaagccccacaggagagccaggtggtggtggaggggggcagcggcgagggacagggctcaccctcccagctgctgtctgacgatgaaaccaaagacgacatgtccatgtcctcctactcggtggtcagcacgggctccctgcaatgtgaagaccttgcagacgacacggtgctggtgggcggggaggcctgcagccccacagcgcgcatcggcggcaccgtcgacaccgactggtgcatctcctttgagcagatcctggcctccatcctgacggagtccgtgctggtgaacttctttgagaagagagtggacattggactcaagatcaaggaccaaaagaaagtggagagacagttcagcaccgccagtgaccatgagcagcctggagtttccggctga

SEQ ID NO: 571 - DNA, 2319 bp, Homo Sapiens
atggcggaagctcaccaggccgtggccttccagttcacggtgaccccagacggggtcgacttccggctcagtcgggaggccctgaaacacgtctacctgtctgggatcaactcctggaagaaacgcctgatccgcatcaagaatggcatcctcaggggcgtgtaccctggcagccccaccagctggctggtcgtcatcatggcaacagtgggttcctccttctgcaacgtggacatctccttggggctggtcagttgcatccagagatgcctccctcaggggtgtggcccctaccagaccccgcagacccgggcacttctcagcatggccatcttctccacgggcgtctgggtgacgggcatcttcttcttccgccaaaccctgaagctgcttctctgctaccatgggtggatgtttgagatgcatggcaagaccagcaacttgaccaggatctgggctatgtgtatccgccttctatccagccggcaccctatgctctacagcttccagacatctctgcccaagcttcctgtgcccagggtgtcagccacaattcagcggtacctagagtctgtgcgccccttgttggatgatgaggaatattaccgcatggagttgctggccaaagaattccaggacaagactgcccccaggctgcagaaatacctggtgctcaagtcatggtgggcaagtaactatgtgagtgactggtgggaagagtacatctaccttcgaggcaggagccctctcatggtgaacagcaactattatgtcatggaccttgtgctcatcaagaatacagacgtgcaggcagcccgcctgggaaacatcatccacgccatgatcatgtatcgccgtaaactggaccgtgaagaaatcaagcctgtgatggcactgggcatagtgcctatgtgctcctaccagatggagaggatgttcaacaccactcggatcccgggcaaggacacagatgtgctacagcacctctcagacagccggcacgtggctgtctaccacaagggacgcttcttcaagctgtggctctatgagggcgcccgtctgctcaagcctcaggatctggagatgcagttccagaggatcctggacgacccctccccacctcagcctggggaggagaagctggcagccctcactgcaggaggaagggtggagtgggcgcaggcacgccaggccttctttagctctggaaagaataaggctgccttggaggccatcgagcgtgccgctttcttcgtggccctggatgaggaatcctactcctatgaccccgaagatgaggccagcctcagcctctatggcaaggccctgctacatggcaactgctacaacaggtggtttgacaaatccttcactctcatttccttcaagaatggccagttgggtctcaatgcagagcatgcgtgggcagatgctcccatcattgggcacctctgggagtttgtcctgggcacagacagcttccacctgggctacacggagaccgggcactgcctgggcaaaccgaaccctgcgctcgcacctcctacacggctgcagtgggacattccaaaacagtgccaggcggtcatcgagagttcctaccaggtggccaaggcgttggcagacgacgtggagttgtactgcttccagttcctgccctttggcaaaggcctcatcaagaagtgccggaccagccctgatgcctttgtgcagatcgcgctgcagctggctcacttccgggacaggggtaagttctgcctgacctatgaggcctcaatgaccagaatgttccgggagggacggactgagactgtgcgttcctgtaccagcgagtccacagcctttgtgcaggccatgatggaggggtcccacacaaaagcagacctgcgagatctcttccagaaggctgctaagaagcaccagaatatgtaccgcctggccatgaccggggcagggatcgacaggcacctcttctgcctttacttggtctccaagtacctaggagtcagctctcctttccttgctgaggtgctctcggaaccctggcgtctctccaccagccagatcccccaatcccagatccgcatgttcgacccagagcagcaccccaatcacctgggcgctggaggtggctttggccctgtagcagatgatggctatggagtttcctacatgattgcaggcgagaacacgatcttcttccacatctccagcaagttctcaagctcagagacgaacgcccagcgctttggaaaccacatccgcaaagccctgctggacattgctgatcttttccaagttcccaaggcctacagctga

SEQ ID NO: 572 - DNA, 618 bp, Homo Sapiens
atggcctcagatcaccagacccaggcgggcaagccacagtccctcaaccccaagatcatcatctttgagcaggaaaactttcaaggccactcgcatgagctcaatgggccctgccccaacctgaaggaaactggcgtggagaaggcaggttctgtcctagtgcaggctggaccctgggtgggctatgaacaggccaactgcaagggcgagcagtttgtgtttgagaagggtgagtacccccgctgggactcatggaccagcagccgaaggacggactccctcagctccctgaggcccatcaaagtggacagccaagagcacaagatcatcctctatgaaaaccccaacttcaccgggaagaagatggaaatcatagatgacgatgtacccagcttccacgcccatggctaccaggagaaggtgtcatctgtgcgggtgcagagtggcacgtgggttggctaccagtaccccggctaccgtgggctgcagtacctgctggagaagggagactacaaggacagcagcgactttggggcccctcacccccaggtgcagtccgtgcgccgtatccgcgacatgcagtggcaccaacgtggtgccttccacccctccaactag

SEQ ID NO: 573 - DNA, 1221 bp, Homo Sapiens
atgacgctggacgtggggccggaggatgagctgcccgactgggccgccgccaaagagttttaccagaagtacgaccctaaggacgtcatcggcagaggagtgagctctgtggtccgccgttgtgttcatcgagctactggccacgagtttgcggtgaagattatggaagtgacagctgagcggctgagtcctgagcagctggaggaggtgcgggaagccacacggcgagagacacacatccttcgccaggtcgccggccacccccacatcatcaccctcatcgattcctacgagtcttctagcttcatgttcctggtgtttgacctgatgcggaagggagagctgtttgactatctcacagagaaggtggccctctctgaaaaggaaaccaggtccatcatgcggtctctgctggaagcagtgagctttctccatgccaacaacattgtgcatcgagatctgaagcccgagaatattctcctagatgacaatatgcagatccgactttcagatttcgggttctcctgccacttggaacctggcgagaagcttcgagagttgtgtgggaccccagggtatctagcgccagagatccttaaatgctccatggatgaaacccacccaggctatggcaaggaggtcgacctctgggcctgtggggtgatcttgttcacactcctggctggctcgccacccttctggcaccggcggcagatcctgatgttacgcatgatcatggagggccagtaccagttcagttcccccgagtgggatgaccgttccagcactgtcaaagacctgatctccaggctgctgcaggtggatcctgaggcacgcctgacagctgagcaggccctacagcaccccttctttgagcgttgtgaaggcagccaaccctggaacctcaccccccgccagcggttccgggtggcagtgtggacagtgctggctgctggacgagtggccctaagcacccatcgtgtacggccactgaccaagaatgcactgttgagggacccttatgcgctgcggtcagtgcggcacctcatcgacaactgtgccttccggctctacgggcactgggtaaagaaaggggagcagcagaaccgggcggctctctttcagcaccggccccctgggccttttcccatcatgggccctgaagaggagggagactctgctgctataactgaggatgaggccgtgcttgtgctgggctag

SEQ ID NO: 574 - DNA, 870 bp, Homo Sapiens
atgagcggcttcagcaccgaggagcgcgccgcgcccttctccctggagtaccgagtcttcctcaaaaatgagaaaggacaatatatatctccatttcatgatattccaatttatgcagataaggatgtgtttcacatggtagttgaagtaccacgctggtctaatgcaaaaatggagattgctacaaaggaccctttaaaccctattaaacaagatgtgaaaaaaggaaaacttcgctatgttgcgaatttgttcccgtataaaggatatatctggaactatggtgccatccctcagacttgggaagacccagggcacaatgataaacatactggctgttgtggtgacaatgacccaattgatgtgtgtgaaattggaagcaaggtatgtgcaagaggtgaaataattggcgtgaaagttctaggcatattggctatgattgacgaaggggaaaccgactggaaagtcattgccattaatgtggatgatcctgatgcagccaattataatgatatcaatgatgtcaaacggctgaaacctggctacttagaagctactgtggactggtttagaaggtataaggttcctgatggaaaaccagaaaatgagtttgcgtttaatgcagaatttaaagataaggactttgccattgatattattaaaagcactcatgaccattggaaagcattagtgactaagaaaacgaatggaaaaggaatcagttgcatgaatacaactttgtctgagagccccttcaagtgtgatcctgatgctgccagagccattgtggatgctttaccaccaccctgtgaatctgcctgcacagtaccaacagacgtggataagtggttccatcaccagaaaaactaa

SEQ ID NO: 575 - DNA, 321 bp, Homo Sapiens
atggtgcatatagcaataaagacccccctccaccctgcaacccccatcccccaccgggcctttgtccctgccttggcttttctccccttctcattctcctctcccctttcctcactgaaggctgtgagttgctttcaatgtgacaacactatgatgtcatttggaaggatttgccaggacagactgattctgagtcctgggtgccgtatgtgtatgcggcagtgttgtcaggcgatcttgtttgaagctctatgttgccataattaccatcaagtacacactgttggcaaaaggctaacacctgactttagaaaatgctga

SEQ ID NO: 576 - DNA, 1563 bp, Homo Sapiens
atggagtgtccacacctgagctccagcgtctgcattgctccggactcagccaagttccccaacggctccccgtcgtcctggtgctgcagcgtgtgccggtccaacaaaagcccttgggtctgtttgacttgttcaagtgtccactgtggaaggtatgtgaatggccatgcaaaaaaacattatgaagatgcacaagtacctttaaccaaccataagaaatcagaaaagcaagataaagttcagcacacagtatgtatggattgcagtagctacagtacatactgttatcgctgtgatgattttgtggttaatgacaccaagctgggactggtacagaaagtcagagaacacttacagaacttggaaaactcagctttcacagctgacaggcataagaaaagaaaacttttggaaaactcaacactaaacagcaagttattaaaagtaaatggaagcaccactgccatttgtgccacaggccttcggaatttggggaacacatgtttcatgaatgccatccttcagtcactcagtaacattgagcagttttgctgttatttcaaagaactgcccgccgtggagttaaggaatgggaaaacagcaggaaggcggacataccacaccaggagccaaggggataacaatgtgtctttggtagaagagtttagaaagacactctgtgctttatggcaaggcagccagactgcatttagcccagagtccttattttatgttgtttggaagattatgccaaactttaggggctatcaacagcaggacgcccatgaattcatgcgctaccttttggaccacctacacttggaacttcagggcggtttcaacggtgtttcccgctcagcaattctgcaggagaattctactctgtctgcaagtaacaagtgttgcataaatggagcatctactgttgtcacggctatattcggaggcattctccaaaatgaggttaactgcctcatatgtgggacagaatctagaaagtttgatccattcctagacctttcattagatattccaagtcagttcagaagtaagcgctctaagaatcaagaaaatggaccagtttgttcgttacgagattgtcttcgcagttttaccgacttagaagaacttgatgagacagagttatatatgtgccataaatgcaaaaagaaacaaaagtccacaaaaaagttttggattcaaaaactacccaaggtgctatgcttacatttgaaaagatttcattggacagcatatttaagaaataaagttgatacatacgtagaatttccactgagaggcctagacatgaaatgctacttactagagcctgagaacagtggcccggagagctgcctgtatgacctcgccgctgtggtggtgcaccatggttccggggttggttctggacattacacagcatacgcaactcacgaaggccgctggttccacttcaatgacagtactgtaacactgactgacgaggagactgtggtgaaggcgaaggcctacatccttttctacgtggaacaccaggccaaagctggatcggataaactttaa

SEQ ID NO: 577 - DNA, 729 bp, Homo Sapiens
atgttgaccaggaagatcaagctgtgggacatcaacgcccacatcacctgccgcctgtgcagcgggtacctcatcgacgccaccacggtgaccgagtgtctgcacaccttctgcaggagctgcctggtgaagtacctggaggagaacaacacctgccccacctgcaggattgtgatccaccagagccaccccctgcagtacatcggtcatgacagaaccatgcaagatattgtttacaaattggtaccaggcctccaagaagcggaaatgagaaagcagagggagttctatcacaaattgggcatggaggtgccgggagacatcaagggggagacctgctctgcaaaacagcacttagattcccatcggaatggtgaaaccaaagcagacgacagttcaaacaaagaggccgcggaggagaagccggaggaggacaacgactaccaccgcagcgacgagcaggtgagcatctgcctggagtgtaacagcagcaaactgcgcgggctgaagcggaagtggatccgctgctcagcccaggcgaccgtcttgcatctgaagaagttcatcgccaaaaaactcaacctttcatcctttaacgagctggacattttatgcaacgaggagatcctgggcaaggaccacacactcaagttcgtggttgtcactaggtggagattcaagaaggcgccgctcctgctgcactacagacccaagatggacttgctgtga

SEQ ID NO: 578 - DNA, 4642 bp, Homo Sapiens
gggagccctgtgctctgaccccagggcccagccacctggccctcacgttcctgcccagcaagccgggtgcccggccccagcccgagggagccagctgggatgcagggcctggtggggcaccctcggcctgggcggacccaggggagggcggcccaagccccatgctcctccctgagggcctgtcttcccaggctctgtccacggaggctcctctcccggccaccctggagccccggattgtgatgggagaggagacgtgccaggccctcctgtcacccagagctgcccggacagcgctcagggaccaggagggtgggcacgcaagcccagacccaccccccgagctgtgttctcagggtgatctttctgtgccttcccctcccccagaccctgattccttcttcacgcctccctccacccccaccaagaccacctatgccctgcttcctgcctgtgggccccacggggacgccagggactcagaggctgagctgcgggatgagctgctggactcgccccccgcctcaccctcgggctcctacattacggccgatggggacagctgggcctcttcaccctcctgttccctcagcctgctggctccggctgaagggctggacttcccctcaggctggggcctgtccccgcaggggtccatggtggatgaacgagagctgcacccagcagggaccccagagcccccgtcctctgagtccagcctctctgcagacagcagctcctcctggggccaggagggccacttcttcgacctggacttcctggccaatgacccaatgatccccgcagccctcctacccttccagggcagcctcatctttcaggtggaggcagtggaggtgacaccgctatccccagaggaagaagaagaggaggctgtggcggatcccgacccaggtggggacctggctggggagggtgaggaggacagcacgtctgcctccttcctgcagtcactgtctgacctgtccatcacggagggcatggacgaggcttttgccttccgggacgacacctctgcagcctcctctgattcagactcagcctcctacgcagaggcagatgatgagaggctgtacagcggggagccccatgcccaggccactttgctccaggacagtgtccagaagacagaggaggagagcggaggtggggccaaggggctgcaggctcaggatgggactgtgtcctgggccgtggaggctgctcctcagacctcagacagaggggcctatctgtcccagagacaggaattgatctcagaagtaacagaagagggccttgctttaggccaggagtccactgccactgtgacccctcacactctgcaggtagccccaggcctccaggtggaggtggctaccagagtgaccccacaggctggggaggaagaaacagactccaccgctggacaagaatctgctgccatggcaatgcctcagccctcccaggagggcatcagcgagatcttaggccaagagtctgtcactgcagaaaaacttccaactccacaggaagaaacaagcctcacattgtgtccagactctcctcagaacttgaaggaagaaggagggctggacctcccctctggcagaaagcctgtagctgcagccacgattgtccccaggcaggctaaagaggacctcaccttaccccaggactccgctatgacaccgcctctgcccctacaagacacagatctctcatcagccccaaagcctgtggctgcagccacgattgtgtcccagcaggctgaagagggcctcaccttaccccaggactccgttatgacaccgcctctgcccctacaagacacagaactctcgtcagccccaaagcctgtggctgcagccacgcttgtgtcccagcaggctgaagagggcctcaccttaccccaggactccgctatgacaccgcctctgcccctacaagacacagatctctcgtcagccccaaagcctgtggctgcagccacgcttgtgtcccagcaggctgaagagggcctcaccttaccccaggactccgctatgacaccgcctctgcccctacaagacacagatctctcgtcagccccaaagcctgtggctgcagccacgcttgtgtcccagcaggctgaagagggcctcaccttaccccaggactccgctatgacaccgcctctgcccctacaagacacagatctctcgtcagccccaaagcctgtggctgcagccacgattgtgtcccagcaggctgaagagggcctcaccttaccccaggactccgctatgacaccgcctctgcccctacaagacacagatctctcgtcagccccaaagcctgtggctgcagccacgattgtgtcccagcaggctgaagagggcctcaccttaccccaggactccgctatgacaccgcctctgcccctacaagacacagatctctcgtcagccccaaagcctgtggctgcagccacgcctgtgtcccagcaggctgaagagggcctcaccttaccccaggactccgctatgacaccgcctctgcccctacaagacacagatctctcgtcagccccaaagcctgtggctgcagccacgcctgtgtcccagcaggctgaagagggcctcaccttaccccaggactccgctatgacagcacctctgcctctgcaagacacaggccccacctcaggtccagagcctctggctgtggccacccctcaaaccttgcaggcagaagcaggctgtgccccagggacagagcctgtggccaccatggctcagcaggaagtaggtgaggccttaggccccaggccagcacctgaggagaagaatgcagccctccctacagtcccggagcctgcagccttggaccaggtccaacaggatgacccacagccagctgcagaagctgggacaccttgggccgcacaggaagatgcggattccactttgggcatggaggccctcagtctccctgagccggcctctggtgctggggaggaaatagcagaagccctttctaggcctggacgggaagcatgtctggaagcgcgagcgcacacaggtgatggggctaagcctgactcaccccaaaaggagaccctggaggttgagaaccagcaggaaggaggcctgaagctactggcacaggaacatggacccaggtcagcacttggaggtgcaagggaggtccccgatgcgcctcctgctgcctgccctgaggtcagccaggcccggctcctgagcccagccagggaggaaagaggcctgagtggcaagtccaccccggagcccacgcttccctcagctgtggccacagaggccagtctggactcctgcccagagtcttcagtaggggctgtgtccagtctggacagaggctgccctgacgcgcctgcccccacgtctgcaccaacctcccagcagccggagcctgtactgggtctgggcagtgttgagcaaccccacgaagtacccagtgtccttggcacccccttgctgcagcccccagaaaaccttgccaagggtcagcccagcacgcccgtggacaggcccctgggccctgacccttctgctcctggtacccttgctggggcagccctacccccactggagcccccagccccctgcctgtgccaggacccccaggaagactctgtggaagacgaggagcccccaggctctctgggcctcccaccgccccaggcaggagtccagcctgccgctgctgctgtctcaggaaccacacagcctctggggactgggccgcgagtcagcctctcgcctcactccccactcctcagccccaaggtggcctccatggatgccaaagacctggccttgcagatcttgccgccttgccaagtgcctcctccctctgggccccagagcccagctggccctcaagggctctcagcccccgagcagcaagaggatgaggacagcctggaggaagactcgcctcgggccctgggctcgggccagcattcggatagccacggggagtcatcagccgagctggacgagcaggacatcttggctcctcagaccgtgcagtgtccagcccaggccccagcaggcggcagtgaggagaccatcgccaaagccaagcagagtcgcagtgagaagaaggcccgaaaggcaatgtcaaagctgggcttgcggcagattcagggagtcaccaggatcaccatccagaagtccaagaacatcctctttgtcatcgccaagcctgatgtcttcaagagcccagcctcagacacttatgtggtctttggcgaggccaagattgaggacctgtcccagcaagtgcacaaagccgcagctgagaagtttaaggtgccctcagagccctcagccttggtccctgagtcagcacccaggccccgggtgaggctggagtgcaaggaagaggaagaggaggaggaggaagaggtggacgaggcggggctggaactgcgtgacattgagctggtgatggcgcaggccaatgtgtccagggccaaggccgtgcgggctctgagagacaaccacagtgacatcgtcaacgccatcatggaactgaccatgtagccactgaccggaagctggagccatcctacgccttccctcagctctgctactcaataaatcggtgtcccttc

SEQ ID NO: 579 - DNA, 1113 bp, Homo Sapiens
atgaatgtcaccccagaggtcaagagtcgtgggatgaagtttgctgaggagcagctgctaaagcatggatggactcaaggcaaaggcctcggccggaaggagaatggtatcactcaggctctcagggtgacactgaagcaagacactcatggggtaggacatgaccctgccaaggagttcacaaaccactggtggaatgagctcttcaacaagactgcggccaacttggtagtggaaactgggcaggatggagtacagataaggagcctttctaaggagaccacccgttataatcatcccaagcccaacttgctgtatcagaagtttgtgaagatggctacattgacttcaggtggagagaagccaaacaaagacttggagagctgcagtgatgacgacaaccaggggtccaagtccccaaagattctgactgatgagatgctgctccaagcctgtgaggggcgaacagcacacaaggctgcccgtcttgggatcacaatgaaggccaagcttgctcgcctagaggcccaggagcaggccttcctggctcgtctcaaaggccaggaccctggggcccctcaactgcagtcagagagcaagccccccaaaaaaaagaaaaagaaaaggaggcagaaagaggaggaagaagctacagcatctgaaaggaatgatgcagatgagaagcacccagaacatgctgagcagaacatcagaaaaagcaagaagaagaaaaggcgacatcaagaaggaaaggtctcagatgaaagagagggtacaactaaagggaatgagaaggaggacgctgcaggaacaagtgggcttggggaattgaatagcagagagcaaaccaatcagtccctcaggaaagggaagaaaaagaagaggtggcaccatgaagaggagaagatgggggtcttggaggaaggaggaaaaggcaaggaggctgcaggcagtgtcaggacagaggaggtagagagcagggcatatgctgacccatgcagccgaagaaagaagaggcagcaacaggaggaggaggacttgaacctagaagatagaggtgaggaaacttttaggtggtggaaccagggaagcagagagcagagcatgcagtga

SEQ ID NO: 580 - DNA, 1191 bp, Homo Sapiens
atgtggatcccagtggtcgggcttcctcggcggctgaggctctccgccttggcgggcgctggtcgcttttgcattttagggtctgaagcggcgacgcgaaagcatttgccggcgaggaaccactgtgggctctctgactcctctccgcagctgtggcccgaaccggatttcaggaatccgccaaggaaggcgtctaaggccagcttagactttaagcgttacgtaaccgatcggagattggctgagaccctggcgcaaatctatttgggaaaaccaagtagacctccacacctactgctggagtgcaatccaggtcctggaatcctgactcaggcattacttgaagctggtgccaaagtggttgcgctcgaaagtgacaaaacttttattccacatttggagtccttaggaaaaaatctggatggaaaactacgagtgattcactgtgacttctttaaactagatcctagaagtggtggagtaataaaaccacctgctatgtcttctcgagggctctttaagaatttgggaatagaagcagttccttggacagcagacatccctttaaaagtagttggaatgttcccaagtagaggtgagaaaagggcactttggaaactcgcatatgacttgtattcctgtacttctatatataaatttggacgaatagaagtaaatatgtttattggtgaaaaagaattccagaaactaatggcagatcccggaaatccagacttgtatcatgtattaagtgttatctggcaattagcttgtgagattaaggttctgcacatggagccttggtcatcatttgatatatacacccggaaagggccgctggaaaacccaaagcgtagggaattattagaccaattacaacaaaagctgtatcttattcaaatgattcctcgtcaaaatttatttaccaagaacttaacacctatgaactataatatattttttcacttgttaaagcactgttttgggaggcgcagcgccactgtaatagaccacttacgttcattgactccacttgatgcgagagatatattgatgcaaataggaaaacaggaggatgagaaagtagttaacatgcaccctcaagacttcaaaacactttttgaaactatagagcgttccaaagattgtgcttataaatggctgtatgatgaaaccctggaagataggtag

SEQ ID NO: 581 - DNA, 2343 bp, Homo Sapiens
atggccgcggtggacctggagaagctgcgggcgtcgggcgcgggcaaggccatcggcgtcctgaccagcggcggcgacgcgcaaggcatgaacgctgctgtccgggctgtgacgcgcatgggcatttatgtgggtgccaaagtcttcctcatctacgagggctatgagggcctcgtggagggaggtgagaacatcaagcaggccaactggctgagcgtctccaacatcatccagctgggcggcactatcattggcagcgctcgctgcaaggcctttaccaccagggaggggcgccgggcagcggcctacaacctggtccagcacggcatcaccaacctgtgcgtcatcggcggggatggcagcctcacaggtgccaacatcttccgcagcgagtggggcagcctgctggaggagctggtggcggaaggtaagatctcagagactacagcccggacctactcgcacctgaacatcgcgggcctagtgggctccatcgataacgacttctgcggcaccgacatgaccatcggcacggactcggccctccaccgcatcatggaggtcatcgatgccatcaccaccactgcccagagccaccagaggaccttcgtgctggaagtgatgggccggcactgcgggtacctggcgctggtatctgcactggcctcaggggccgactggctgttcatccccgaggctccacccgaggacggctgggagaacttcatgtgtgagaggctgggtgagactcggagccgtgggtcccgactgaacatcatcatcatcgctgagggtgccattgaccgcaacgggaagcccatctcgtccagctacgtgaaggacctggtggttcagaggctgggcttcgacacccgtgtaactgtgctgggccacgtgcagcggggagggacgccctctgccttcgaccggatcctgagcagcaagatgggcatggaggcggtgatggcgctgctggaagccacgcctgacacgccggcctgcgtggtcaccctctcggggaaccagtcagtgcggctgcccctcatggagtgcgtgcagatgaccaaggaagtgcagaaagccatggatgacaagaggtttgacgaggccacccagctccgtggtgggagcttcgagaacaactggaacatttacaagctcctcgcccaccagaagccccccaaggagaagtctaacttctccctggccatcctgaatgtgggggccccggcggctggcatgaatgcggccgtgcgctcggcggtgcggaccggcatctcccatggacacacagtatacgtggtgcacgatggcttcgaaggcctagccaagggtcaggtgcaagaagtaggctggcacgacgtggccggctggttggggcgtggtggctccatgctggggaccaagaggaccctgcccaagggccagctggagtccattgtggagaacatccgcatctatggtattcacgccctgctggtggtcggtgggtttgaggcctatgaaggggtgctgcagctggtggaggctcgcgggcgctacgaggagctctgcatcgtcatgtgtgtcatcccagccaccatcagcaacaacgtccctggcaccgacttcagcctgggctccgacactgctgtaaatgccgccatggagagctgtgaccgcatcaaacagtctgcctcggggaccaagcgccgtgtgttcatcgtggagaccatggggggttactgtggctacctggccaccgtgactggcattgctgtgggggccgacgccgcctacgtcttcgaggaccctttcaacatccacgacttaaaggtcaacgtggagcacatgacggagaagatgaagacagacattcagaggggcctggtgctgcggaacgagaagtgccatgactactacaccacggagttcctgtacaacctgtactcatcagagggcaagggcgtcttcgactgcaggaccaatgtcctgggccacctgcagcagggtggcgctccaaccccctttgaccggaactatgggaccaagctgggggtgaaggccatgctgtggttgtcggagaagctgcgcgaggtttaccgcaagggacgggtgttcgccaatgccccagactcggcctgcgtgatcggcctgaagaagaaggcggtggccttcagccccgtcactgagctcaagaaagacactgatttcgagcaccgcatgccacgggagcagtggtggctgagcctgcggctcatgctgaagatgctggcacaataccgcatcagtatggccgcctacgtgtcaggggagctggagcacgtgacccgccgcaccctgagcatggacaagggcttctga

SEQ ID NO: 582 - DNA, 813 bp, Homo Sapiens
atggtgctgctcaaggagtatcgagtaatcctgcctgtgtctgtagatgagtatcaagtggggcagctgtattctgtggctgaggccagtaaaaatgaaacgggtggtggcgaaggcgtggaggtcctggtgaatgagccctacgagaaggacggtgagaaaggccagtacacacacaagatctaccacctgcagagcaaagtacccacgtttgttcgaatgctggccccagagggagccctgaatatacacgagaaagcctggaatgcttacccctactgcagaaccgttattacaaatgagtacatgaaagaagactttctgattaaaattgaaacctggcacaaaccagatcttggcacgcaggagaatgtgcataagctggagcctgaggcgtggaaacacgtggaagccgtatatatagacattgcagatcgaagccaagtgctcagcaaggattacaaggcagaggaagacccagcaaaatttaaatctatcaaaacaggccgaggacccttgggccccaattggaagcaagagcttgtaaaccagaaggactgcccatatatgtgtgcatacaaactggtgaccgtcaagttcaagtggtggggcctgcagaacaaagtggagaacttcatccataagcaagagaggcgtctgtttacaaacttccacaggcagctgttctgttggctcgataagtgggttgacctgaccatggacgacattcgaaggatggaagaagagacgaagagacagctggatgaaatgagacaaaaggacccagtgaaaggaatgacagcagatgactaa

SEQ ID NO: 583 - DNA, 1272 bp, Homo Sapiens
atggcaatggtagttagcagctggcgagatccgcaggacgacgtggccgggggcaaccccggcggccccaaccccgcagcgcaggcggcccgcggcggcggcggcggcgccggcgagcagcagcagcaggcgggctcgggcgcgccgcacacgccgcagaccccgggccagcccggagcgcccgccacccccggcacggcgggggacaagggccagggcccgcccggttcgggccagagccagcagcacatcgagtgcgtggtgtgcggggacaagtcgagcggcaagcactacggccaattcacctgcgagggctgcaaaagtttcttcaagaggagcgtccgcaggaacttaacttacacatgccgtgccaacaggaactgtcccatcgaccagcaccaccgcaaccagtgccaatactgccgcctcaagaagtgcctcaaagtgggcatgaggcgggaagcggttcagcgaggaagaatgcctccaacccagcccaatccaggccagtacgcactcaccaacggggaccccctcaacggccactgctacctgtccggctacatctcgctgctgctgcgcgccgagccctaccccacgtcgcgctacggcagccagtgcatgcagcccaacaacattatgggcatcgagaacatctgcgagctggccgcgcgcctgctcttcagcgccgtcgagtgggcccgcaacatccccttcttcccggatctgcagatcaccgaccaggtgtccctgctacgcctcacctggagcgagctgttcgtgctcaacgcggcccagtgctctatgccgctgcacgtggcgccgttgctggccgccgccggcctgcatgcctcgcccatgtctgccgaccgcgtcgtggccttcatggaccacatccgcatcttccaggagcaggtggagaagctcaaggcgctacacgtcgactcagccgagtacagctgcctcaaagccatcgtgctgttcacgtcagacgcctgtggcctgtcggatgcggcccacatcgagagcctgcaggagaagtcgcagtgcgcactggaggagtacgtgaggagccagtaccccaaccagcccagccgttttggcaaactgctgctgcgactgccctcgctgcgcaccgtgtcctcctccgtcatcgagcagctcttcttcgtccgtttggtaggtaaaacccccatcgaaactctcatccgcgatatgttactgtctgggagcagcttcaactggccttacatgtccatccagtgctcctag

SEQ ID NO: 584 - DNA, 651 bp, Homo Sapiens
atgggcacccgcgacgacgagtacgactacctctttaaagttgtccttattggagattctggtgttggaaagagtaatctcctgtctcgatttactcgaaatgagtttaatctggaaagcaagagcaccattggagtagagtttgcaacaagaagcatccaggttgatggaaaaacaataaaggcacagatatgggacacagcagggcaagagcgatatcgagctataacatcagcatattatcgtggagctgtaggtgccttattggtttatgacattgctaaacatctcacatatgaaaatgtagagcgatggctgaaagaactgagagatcatgctgatagtaacattgttatcatgcttgtgggcaataagagtgatctacgtcatctcagggcagttcctacagatgaagcaagagcttttgcagaaaagaatggtttgtcattcattgaaacttcggccctagactctacaaatgtagaagctgcttttcagacaattttaacagagatttaccgcattgtttctcagaagcaaatgtcagacagacgcgaaaatgacatgtctccaagcaacaatgtggttcctattcatgttccaccaaccactgaaaacaagccaaaggtgcagtgctgtcagaacatctaa

SEQ ID NO: 585 - DNA, 2070 bp, Homo Sapiens
atggaggatactggcatccagcgaggcatctgggatggagatgccaaggctgtccaacaatgtctgacagatatttttaccagcgtttacaccacctgcgacatccctgagaatgctatatttggtccctgtgtcctgagccatacttccctatatgacagcatagctttcatagctctcaagtctactgacaagagaacagtaccgtatatctttcgggtagacacctcagcagcaaatggttcctcagaaggtctcatgtggctgcggttggtccaatcggccagagataaggaagagcagaaccttgaagcctacataaaaaacggacagctgttctaccgctctctccgcaggattgccaaagacgaggagttactagtttggtacgggaaagaactgactgagttactcttgctctgcccctctagatcccacaacaaaatgaatgggtcgtccccttacacatgcctggaatgcagccaacgtttccagtttgagttcccctatgtggcgcatctgcgtttccgctgccccaagagacttcacagcgctgatataagtccccaagacgaacaaggcggcggcgtgggcaccaaggaccacgggggcggcggcggcggtggcaaagaccagcagcagcagcagcaggaggcacctttaggcccgggtcccaagttttgcaaagccggccccctccaccactacccatccccctccccggaaagcagcaacccatccgctgccgccggcggcagcagcgcgaagccatccacagacttccacaacctggccagggagctggaaaactcccggggaggcagcagctgctccccagcccagagcctcagcagcggtagcggcagcggcggcggcggcggccaccaggaggcggagctgagtcccgacggcatcgccacgggcggcggcaaaggaaagaggaaattcccggaggaggcggcggagggcggcggtggcgctggtctggtagggggccggggccgcttcgtagagcggcccctcccggcctccaaggaggatctggtgtgcacaccgcagcagtaccgagcctcgggcagctacttcggcctggaagagaacggccgcctcttcgcgccgccaagtcccgagacgggcgaggcgaagcgcagcgccttcgtggaggtgaagaaggctgcccgcgcggccagcctgcaggaggaggggacagccgacggcgcgggagtcgcctccgaggaccaggacgctggcggcggcggcggctcctccacgcccgcggccgcgtcaccggtgggcgccgagaagctgctggccccgcggcctgggggcccgctgcccagccggctcgagggcggcagtcctgcgaggggcagcgccttcacttcggtgccgcagctgggcagcgcgggcagcaccagcggtgggggcggaacgggcgccggggccgcaggcggcgcgggcgggggccagggcgccgcgtcggacgagcgcaaaagcgccttctcgcagccagcacgctctttctcgcagctgtccccgctggtgctgggccagaagctgggcgcgctcgagccatgccaccccgccgacggcgtgggccccaccagactctatcccgccgccgcggaccctctagcggtgaagctccagggggccgcggacctgaacggaggttgcgggtccctgccgagcggcggcggcggcctgcctaagcagagccccttcctgtacgccaccgccttctggcccaagagctccgctgccgctgcagccgcggctgcggcggcggccgcggggcccttgcagctgcagctgccctcggcgctcacgctgctgccgccctccttcacctcgctgtgtctgcccgcgcagaactggtgcgccaagtgcaatgcctccttccgcatgacctccgacctggtgtaccatatgaggtcgcaccacaaaaaggagtatgcgatggagcccttggtgaagcggcggcgagaggagaaactcaagtgccccatctgcaatgagtccttcagggagcgccaccacctctccaggcacatgacctcgcataattga

SEQ ID NO: 586 - DNA, 1311 bp, Homo Sapiens
atggatcagccttttactgtgaattctctgaaaaagttagctgctatgcctgaccatacagatgtttccctaagcccagaagagcgagtccgtgccctaagcaagcttggttgtaatatcaccatcagtgaagacatcactccacgacgttactttaggtctggagtagagatggagaggatggcgtctgtgtatttggaagaaggaaatttggaaaatgcctttgttctttataataaatttataaccttatttgtagaaaagcttcctaaccatcgagattaccagcaatgtgcagtacctgaaaagcaggatattatgaagaaactgaaggagattgcattcccaaggacagatgaattgaaaaacgaccttttaaagaaatataacgtagaataccaagaatatttgcaaagcaaaaacaaatataaagctgaaattctcaaaaaattggagcatcagagattgatagaggcagaaaggaagcggattgctcagatgcgccagcagcagctagaatcggagcagtttctgtttttcgaagatcaactcaagaagcaagagttagcccgaggtcaaatgcgaagtcagcaaacctcagggctgtcagagcagattgatgggagcgctttgtcctgcttttccacacaccagaacaattccttgctgaatgtatttgcagatcaacctaataaaagtgatgcaaccaattatgctagccactctcctcctgtaaacagggccttaacaccagctgctactctaagtgctgttcagaatttagtggttgaaggactgcgatgtgtagttttgccagaagatctttgccacaaatttctgcaactggcagaatctaatacagtgagaggaatagaaacctgtggaatactctgtggaaaactgacacataatgaatttactattacccatgtaattgtgccaaagcagtctgcgggaccagactattgtgacatggagaatgtagaggaattattcaatgttcaggatcaacatgatctcctcactctaggatggatccatacacatcccactcaaactgcatttttatccagcgttgatcttcacactcactgttcctatcaactcatgttgccagaggccattgccattgtttgctcaccaaagcataaagacactggcatcttcaggctcaccaatgctggcatgcttgaggtttctgcttgtaaaaaaaagggctttcatccacacaccaaggagcccaggctgttcagtatatgcaaacatgtgttggtaaaagacataaaaataattgtgttggatctgaggtga

SEQ ID NO: 587 - DNA, 321 bp, Homo Sapiens
atggctcaagagtttgtgaactgcaaaatccagcctgggaaggtggttgtgttcatcaagcccacctgcccgtactgcaggagggcccaagagatcctcagtcaattgcccatcaaacaagggcttctggaatttgtcgatatcacagccaccaaccacactaacgagattcaagattatttgcaacagctcacgggagcaagaacggtgcctcgagtctttattggtaaagattgtataggcggatgcagtgatctagtctctttgcaacagagtggggaactgctgacgcggctaaagcagattggagctctgcagtaa

SEQ ID NO: 588 - DNA, 618 bp, Homo Sapiens
atgaccgagcgccgcgtccccttctcgctcctgcggggccccagctgggaccccttccgcgactggtacccgcatagccgcctcttcgaccaggccttcgggctgccccggctgccggaggagtggtcgcagtggttaggcggcagcagctggccaggctacgtgcgccccctgccccccgccgccatcgagagccccgcagtggccgcgcccgcctacagccgcgcgctcagccggcaactcagcagcggggtctcggagatccggcacactgcggaccgctggcgcgtgtccctggatgtcaaccacttcgccccggacgagctgacggtcaagaccaaggatggcgtggtggagatcaccggcaagcacgaggagcggcaggacgagcatggctacatctcccggtgcttcacgcggaaatacacgctgccccccggtgtggaccccacccaagtttcctcctccctgtcccctgagggcacactgaccgtggaggcccccatgcccaagctagccacgcagtccaacgagatcaccatcccagtcaccttcgagtcgcgggcccagcttgggggcccagaagctgcaaaatccgatgagactgccgccaagtaa

SEQ ID NO: 589 - DNA, 1395 bp, Homo Sapiens
atgctggcaacacggcggctgctcggctggtcgcttcccgcgcgggtatctgtgcgtttcagcggcgacacgacagcacccaagaaaacctcatttggctcgctgaaggatgaagaccggattttcaccaacctgtacggccgccatgactggaggctgaaaggttccctgagtcgaggtgactggtacaagacaaaggagatcctgctgaaggggcccgactggatcctgggcgagatcaagacatcgggtttgaggggccgtggaggcgctggcttccccactggcctcaagtggagcttcatgaataagccctcagatggcaggcccaagtatctggtggtgaacgcagacgagggggagccgggcacctgcaaggaccgggagatcttacgccatgatcctcacaagctgctggaaggctgcctggtggggggccgggccatgggcgcccgcgctgcctatatctacatccgaggggaattctacaatgaggcctccaatctgcaggtggccatccgagaggcctatgaggcaggtctgattggcaagaatgcttgtggctctggctatgattttgacgtgtttgtggtgcgcggggctggggcctacatctgtggagaggagacagcgctcatcgagtccattgagggcaagcagggcaagccccgcctgaagccccccttccccgcagacgtgggagtgtttggctgccccacaactgtggccaacgtggagacagtggcagtgtcccccacaatctgccgccgtggaggtacctggtttgctggctttggcagagaacgcaactcaggcaccaaactattcaacatctctggccatgtcaaccacccttgcactgtggaggaggagatgtctgtgcccttgaaagaactgattgagaagcatgctgggggtgtcacgggcggctgggacaacctccttgctgtgatccctggcggctcgtctaccccactgatccccaagtctgtgtgtgagacggtgctgatggacttcgatgcgctggtgcaggcacagacaggcctgggcacagctgcggtgatcgtcatggaccgctcgacggacatcgtgaaagccatcgcccgcctcattgagttctataagcacgagagctgtggccagtgtaccccatgccgtgagggtgtggactggatgaacaaggtgatggcacgtttcgtgaggggggatgcccggccggccgagatcgactccctgtgggagatcagcaagcagatagaaggccatacgatttgtgctctgggtgacggggccgcctggcctgtgcagggtctgatccgccactttcggccggagctcgaggagcggatgcagcggtttgcccagcagcatcaggcccggcaggctgcctcttag

SEQ ID NO: 590 - DNA, 1422 bp, Homo Sapiens
atggctgccccgtgtttgctgcggcaaggacgagccggggcgctgaagactatgctccaggaagcccaggtgtttcgaggacttgcttctacggtttctttgtctgcggaatcagggaagagtgaaaagggtcagccacagaattccaagaagcaaagtccaccaaaaaatgtagtggaaccaaaggagaggggcaagctcctagccacccagacagcagctgaattgtctaaaaacttatcttcacccagttcttacccgccagctgtgaataagggcaggaaggtagctagtcccagtcccagtggcagcgtgctattcacagatgaaggggttccgaaatttttgtcaagaaagactttggtagagtttccacagaaagttctgtctccattcagaaaacagggctctgattcagaagctcgtcaggtgggtcggaaagtgacgtcgccttcgtcttcatcctcttccagctcctctgattctgaatctgatgatgaggctgacgtttcagaggtcactcctcgagtggtgagcaaaggcagaggggggcttcgaaaaccagaggcctctcattcctttgaaaacagagccccccgagttacagtatcagcaaaagagaaaaccttgctgcagaagccgcatgtggacattactgatccagagaagccccaccagccaaagaagaaagggtcccctgctaagccatcagaaggcagggaaaatgcgagaccaaaaaccacaatgcccagatctcaagtagatgaagagtttttgaagcaaagtttaaaggaaaaacaattgcagaaaacatttagattaaatgaaatagataaagaaagccaaaagccatttgaagttaaaggacccttacctgtccacacaaaatcagggttgtctgcgccaccgaagggcagcccagcgcctgctgtgttggcagaagaggccagagcagaggggcagctgcaagccagtcctcctggggcggcagaggggcatctggaaaaacccgtgccagagccccagcgcaaggcggcccctcccctgcccagaaaggaaacctcagggacgcagggaatagaaggccacctgaagggtggacaggcaatcgtggaagatcagataccaccaagcaatttggagacagttcctgttgagaataaccacggtttccatgaaaagacagcagcgctgaagcttgaggccgagggcgaggccatggaagatgcagccgcgccaggggacgaccgaggcggcacacaggagccagccccagtgcctgctgagccgtttgacaacactacctacaagaacctgcagcatcatgactacagcacgtacaccttcttagacctcaacctcgaactctcaaaattcaggatgcctcagccctcctcaggccgggagtcacctcgacactga

SEQ ID NO: 591 - DNA, 588 bp, Homo Sapiens
atggcgccggccgcgtccaggctgcgggccgaagccgggctcggggcgctgccgcggcgggcgctcgcccagtacttgctcttcctgcggctctacccggtgctcaccaaggcggccaccagtggcattttgtcagcacttgggaacttcctggcccagatgattgagaagaagcggaaaaaagaaaactctagaagtctggatgtcggtgggcctctgagatatgccgtttacgggttcttcttcacagggccgctgagtcacttcttctacttcttcatggaacattggatccctcctgaggtccccctggcagggctcaggaggcttctcctggaccgcctcgtctttgcaccggccttcctcatgttgttcttcctcatcatgaactttctggaggggaaagacgcctcagccttcgccgccaagatgagggggggcttctggccggcgctgaggatgaactggcgggtgtggacgccactacagttcatcaacatcaactacgtccctctgaagttccgggtgctcttcgccaacctggcagctctgttctggtatgcctacctggcctccttggggaagtga

SEQ ID NO: 592 - DNA, 3339 bp, Homo Sapiens
atggccctcaagatggtgaagggcagcatcgaccgcatgttcgacaagaatctgcaggacttggtccgcggcatccgtaaccacaaggaggacgaggcaaaatacatatctcagtgcattgatgagatcaagcaggagctgaagcaggacaacatagcggtgaaggcgaacgcggtctgcaagctgacgtatttacagatgttgggatacgacatcagctgggccgccttcaacatcatagaagtgatgagtgcctccaagttcaccttcaagcgaattggctacctcgctgcttcccagagctttcacgaaggcaccgacgtcatcatgctgaccaccaatcagatccgtaaggacttgagcagccccagccagtacgacacaggtgttgcactgacgggtctgtcctgcttcgtcaccccagaccttgccagagacctggcaaatgacatcatgacactgatgtcacacaccaagccctacatcaggaagaaggctaagctgatcgagcccctcaccaatctcatccacagcacgtctgccatgtctctcctctatgaatgtgtgaacaccgtgattgcagtgctcatctcgctgtcctccggcatgcccaaccacagcgccagcatccagctttgtgttcagaaattaaggatattgatcgaggactccgatcagaacttgaagtacctggggctgctggcaatgtccaagatcctgaagacccaccccaagtccgtgcagtcccacaaggacctcatcctgcagtgcctggacgacaaggacgagtccatccggctgcgggccctggacctgctctatgggatggtgtccaagaagaacctgatggagatcgtgaagaagctgatgacccacgtagacaaggcagagggtaccacctaccgtgacgagctgctcaccaagatcattgacatctgcagccagtccaactaccagtacatcaccaacttcgagtggtacatcagcatcctggtggagctgacccggctggagggcacacggcacggccacctcatcgccgcccaaatgctggacgtggccatccgcgtgaaggccatccgcaagttcgccgtgtcccagatgtctgcgctgcttgacagtgcacacctgctggccagcagcacccagcggaacgggatctgtgaggtgctgtacgctgccgcctggatctgcggggagttctcagagcatctgcaggaaccacaccacactttggaggccatgctgcggcccagagtcaccacgctgccaggccacatccaggccgtgtatgtgcagaacgtggtcaagctctacgcctccatcctgcagcagaaggagcaggccggggaggcagagggcgctcaggccgtcacccagctcatggtggaccggctgccccagtttgtgcagagcgcagacctggaggtgcaggagcgggcgtcctgcatcctgcagctggtcaagcacatccagaagcttcaggccaaggacgtgcctgtggcagaggaggtcagcgctctctttgctggggagctgaacccagtggcccccaaggcccagaagaaggttccagtccccgaaggcctggacctggacgcctggatcaatgagccactctcggacagcgagtcagaggacgagaggcccagggccgtcttccacgaggaggagcagcggcgtcccaagcaccggccgtcggaggcggacgaggaagagctggctcggcgccgagaggcccggaagcaggagcaggccaacaaccccttctacatcaagagctcgccatcgccacagaagcggtaccaggacaccccgggcgtggagcacattcccgtggtgcagattgacctctccgtccccttgaaggttccagggctgcctatgtcagatcagtatgtgaagctggaggaggagcggcggcaccggcagaagctggagaaggacaagaggaggaaaaagaggaaggagaaggagaagaagggcaagcgccgccacagctcgctgcccacggagagcgacgaggacatcgcccctgcccagcaggtggacatcgtcacagaggagatgcctgagaatgctctgcccagcgacgaggatgacaaagaccccaacgacccctacagggctctggatattgacctggataagcccttagccgacagcgagaaactgcctattcagaaacacagaaacaccgagacctcaaaatcccctgagaaggacgttcccatggtagaaaagaagagcaagaaacccaagaagaaagagaaaaaacacaaagagaaagagagagacaaggagaagaagaaggagaaggagaagaaggctgaggacctggacttctggctgtctaccaccccaccgcctgcccccgcccccgcccccgcccccgttccatccacggacgagtgtgaggacgccaagacggaggcgcagggcgaggaggacgatgccgaggggcaagaccaggacaagaaatctcccaagcctaagaagaagaagcacaggaaggagaaggaggagcggaccaaaggcaagaagaagtccaagaagcagcctccaggcagcgaggaggcagcgggggagccggtgcagaatggcgcgccagaggaggagcagctcccgcctgagtccagctactccctcctcgctgaaaattcctatgttaaaatgacctgtgacatccggggcagtctgcaggaggacagccaggtcactgtggccatcgtgctggagaacaggagcagcagcatcctcaagggcatggagctcagcgtgctggactcactcaatgccaggatggcccggccgcagggctcctccgtccacgatggcgtccccgtgcctttccagctgcccccaggcgtctccaacgaagcccagtatgtgttcaccatccagagcatcgtcatggcgcagaagctcaaggggaccctgtccttcattgccaagaatgacgagggtgcgacccacgagaagctggacttcaggctgcacttcagctgcagctcctacttgatcaccactccctgctacagtgacgcctttgctaagttgctggagtctggggacttgagcatgagctcaatcaaagtcgatggcattcggatgtccttccagaatcttctggcgaagatctgttttcaccaccatttttccgttgtggagcgagtggactcctgcgcctccatgtacagccgctccatccagggccaccatgtctgcctcctggtgaaaaagggtgagaactctgtctcagtcgacgggaagtgcagtgactccacgctactgagcaacttgttagaagagatgaaggcgacgctggccaagtgttga

SEQ ID NO: 593 - DNA, 2892 bp, Homo Sapiens
atggcgactgcggccgaaacctcggcttcagaacccgaggctgagtccaaggctgggcccaaggctgacggagaggaggatgaggttaaggcggctaggacaaggaggaaggtgttatcgcgggctgtggccgctgcgacatacaagaccatggggccagcgtgggatcagcaggaggaaggcgtgagcgagagcgatggggatgagtacgccatggcttcctccgcggagagctcccccggggagtacgagtgggaatatgacgaagaggaggagaaaaaccagctggagattgagagactggaggagcagttgtctatcaacgtctatgactacaactgccatgtggacttgatcagactgctcaggctggaaggggagcttaccaaggtgaggatggcccgccagaagatgagtgaaatctttcccttgactgaagagctctggctggagtggctgcatgacgagatcagcatggcccaggatggcctggacagagagcacgtgtatgacctctttgagaaagccgtgaaggattacatttgtcctaacatttggctagagtatggccagtactcagttggtgggattggtcagaaaggtggccttgagaaagttcgctccgtgtttgaaagggctctctcgtctgttggtttacatatgaccaaaggactcgccctctgggaggcttaccgagagtttgaaagtgcgattgtggaagctgctcggcttgagaaagtccacagtcttttccggcgacagttggcgatcccactctatgatatggaggccacatttgcagagtatgaagaatggtcagaagacccaataccagagtcagtaattcagaactataacaaagcactacagcagctggagaaatataaaccctatgaagaagcactgttgcaggcagaggcaccaaggctggcagaatatcaagcatatatcgattttgagatgaaaattggcgatcctgctcgcattcagttgatctttgagcgcgccctggtcgagaactgccttgtcccagacttatggatccgttacagtcagtacctagatcgacaactgaaagtaaaggatttggttttatctgtacataaccgcgctattagaaactgcccctggacagttgccttatggagtcggtacctcttggccatggagagacatggagttgatcatcaagtaatttctgtaaccttcgagaaagctttgaatgccggcttcatccaggccactgattatgtggagatttggcaggcataccttgattacctgaggagaagggttgatttcaaacaagactccagtaaagagctggaggagttgagggccgcctttactcgtgccttggagtatctgaagcaggaggtggaagagcgtttcaatgagagtggtgatccaagctgcgtgattatgcagaactgggctaggattgaggctcgactgtgcaataacatgcagaaagctcgggaactctgggatagcatcatgaccagaggaaatgccaagtacgccaacatgtggctagagtattacaacctggaaagagctcatggtgacacccagcactgccggaaggctctgcaccgggccgtccagtgcaccagtgactacccagagcacgtctgcgaagtgttactcaccatggagaggacagaaggttctttagaagattgggatatagctgttcagaaaactgaaacccgattagctcgtgtcaatgagcagagaatgaaggctgcagagaaggaagcagcccttgtgcagcaagaagaagaaaaggctgaacaacggaaaagagctcgggctgagaagaaagcgttaaaaaagaagaaaaagatcagaggcccagagaagcgcggagcagatgaggatgatgagaaagagtggggcgatgatgaagaagagcagccttccaaacgcagaagggtcgagaacagcatccctgcagctggagaaacacaaaatgtagaagtagcagcagggcccgctgggaaatgtgctgccgtagatgtggagcccccttcgaagcagaaggagaaggcagcctccctgaagagggacatgcccaaggtgctgcacgacagcagcaaggacagcatcaccgtctttgtcagcaacctgccctacagcatgcaggagccggacacgaagctcaggccactcttcgaggcctgtggggaggtggtccagatccgacccatcttcagcaaccgtggggatttccgaggttactgctacgtggagtttaaagaagagaaatcagcccttcaggcactggagatggaccggaaaagtgtagaagggaggccaatgtttgtttccccctgtgtggataagagcaaaaaccccgattttaaggtgttcaggtacagcacttccctagagaaacacaagctgttcatctcaggcctgcctttctcctgtactaaagaggaactagaagaaatctgtaaggctcatggcaccgtgaaggacctcaggctggtcaccaaccgggctggcaaaccaaagggcctggcctacgtggagtatgaaaatgaatcccaggcgtcgcaggctgtgatgaagatggacggcatgactatcaaagagaacatcatcaaagtggcaatcagcaaccctcctcagaggaaagttccagagaagccggagaccaggaaggcaccaggtggccccatgcttttgccgcagacatacggagcgagggggaagggaaggacgcagctgtctctactgcctcgtgccctgcagcgcccaagtgctgcagctcctcaggctgagaacggccctgccgcggctcctgcagttgccgccccagcagccaccgaggcacccaagatgtccaatgccgattttgccaagctgtttctgagaaagtga

SEQ ID NO: 594 - DNA, 852 bp, Homo Sapiens
atggatttgtggccaggggcatggatgctgctgctgctgctcttcctgctgctgctcttcctgctgcccaccctgtggttctgcagccccagtgccaagtacttcttcaagatggccttctacaatggctggatcctcttcctggctgtgctcgccatccctgtgtgtgccgtgcgaggacgcaacgtcgagaacatgaagatcttgcgtctaatgctgctccacatcaaatacctgtacgggatccgagtggaggtgcgaggggctcaccacttccctccctcgcagccctatgttgttgtctccaaccaccagagctctctcgatctgcttgggatgatggaggtactgccaggccgctgtgtgcccattgccaagcgcgagctactgtgggctggctctgccgggctggcctgctggctggcaggagtcatcttcatcgaccggaagcgcacgggggatgccatcagtgtcatgtctgaggtcgcccagaccctgctcacccaggacgtgagggtctgggtgtttcctgagggaacgagaaaccacaatggctccatgctgcccttcaaacgtggcgccttccatcttgcagtgcaggcccaggttcccattgtccccatagtcatgtcctcctaccaagacttctactgcaagaaggagcgtcgcttcacctcgggacaatgtcaggtgcgggtgctgcccccagtgcccacggaagggctgacaccagatgacgtcccagctctggctgacagagtccggcactccatgctcactgttttccgggaaatctccactgatggccggggtggtggtgactatctgaagaagcctgggggcggtgggtga

SEQ ID NO: 595 - DNA, 630 bp, Homo Sapiens
atggagctgaactccctgctgatcctgctggaggcggccgagtacctggagcgcagggatcgagaggccgagcacggctacgcctcggtgctgcccttcgacggcgacttcgccagggagaaaacaaaggcggccggcctggtgcgcaaggccccgaacaacaggtcttcacacaacgagctagaaaagcacagacgagccaaactcaggctgtaccttgagcagctcaagcaactggtgcccctgggccccgacagcacccgccacaccacgctgagcctcctgaagcgggccaaggtgcacatcaagaaactggaggagcaggaccgccgggcactgagcatcaaggagcagctgcagcaggagcatcgtttcctgaagcggcgcctggagcagctgtcggtgcagagcgtggagcgcgtgcgcacagatagcacgggctctgctgtctccacggacgactcagagcaagaagtggacatagagggcatggagtttggccctggtgagctggacagtgttggcagcagcagtgacgcggacgaccactacagcctgcagagtggcaccggcggcgacagtggcttcgggccccactgccggcggctgggccgccccgccctctcgtag

SEQ ID NO: 596 - DNA, 3051 bp, Homo Sapiens
atgagccaaggcccccccacaggggagagcagcgagcccgaagcaaaagtcctccacactaagcggctttaccgggctgtggtggaggctgtgcatcgacttgacctcatcctttgcaacaaaactgcttatcaagaagtattcaaaccagaaaacattagcctgaggaacaagctgcgtgagctctgcgtcaagcttatgttcctgcacccagtggactatgggagaaaggctgaggagctgctgtggagaaaggtatactatgaagttatccagcttatcaagactaacaaaaagcacatccacagccggagcactttggaatgtgcctacaggacgcacctggttgctggtattggcttctaccagcatctccttctctatatccagtcccactaccagctggaactgcagtgctgcatcgactggacccatgtcactgaccccctcataggatgcaagaagccagtgtctgcctcagggaaggagatggattgggcacagatggcatgtcaccgatgtctggtgtatctgggggatttgtcccgatatcagaatgaattagctggcgtagataccgagctgctagccgagagattttactaccaagccctgtcagtagctcctcagattggaatgcccttcaatcagctgggcaccctggcaggcagcaagtactataatgtggaagccatgtattgctacctgcgctgcatccagtcagaagtgtcctttgagggagcctatgggaacctcaagcggctgtatgacaaggcagccaaaatgtaccaccaactgaagaagtgtgagactcggaaactgtctcctggcaaaaagcgatgtaaagacattaaaaggttgctagtgaactttatgtatctgcaaagcctcctacagcccaaaagcagctccgtggactcagagctgacctcactttgccagtcagtcctggaggacttcaacctctgcctcttctacctgccctcctcacccaacctcagcctggccagtgaggatgaggaggagtatgagagtggatatgctttcctcccggaccttctcatctttcaaatggtcatcatctgccttatgtgtgtgcacagcttggagagagcaggatccaagcagtacagtgcagccattgccttcaccctggccctcttttcccacctcgtcaatcatgtcaacatacggctgcaggctgagctggaagagggcgagaatcccgtcccggcattccagagtgatggcacagatgaaccagagtccaaggaacctgtggagaaagaggaggagccagatcctgagcctcctcctgtaacaccccaagtgggtgagggcagaaagagccgtaagttctctcgcctctcctgtctccgccgtcgccgccacccacccaaagttggtgatgacagtgacctgagtgaaggctttgaatcggactcaagccatgactcagcccgggccagtgagggctcagacagtggctctgacaagagtcttgaaggtgggggaacggcctttgatgctgaaacagactcggaaatgaatagccaggagtcccgatcagacttggaagatatggaggaagaggaggggacacggtcaccaaccctggagccccctcggggcagatcagaggctcccgattccctcaatggcccactgggccccagtgaggctagcattgccagcaatctacaagccatgtccacccagatgttccagactaagcgctgcttccgactggcccccacctttagcaacctgctcctccagcccaccaccaaccctcatacctcggccagccacaggccttgcgtcaatggggatgtagacaagccttcagagccagcctctgaggagggctctgagtcggaggggagtgagtccagtggacgctcctgtcggaatgagcgcagcatccaggagaagcttcaggtcctgatggccgaaggtctgcttcctgctgtgaaagtcttcctggactggcttcggaccaaccccgacctcatcatcgtgtgtgcgcagagctctcaaagtctgtggaaccgcctgtctgtgttgctgaatctgttgcctgctgctggtgaactccaggagtctggcctggccttgtgtcctgaggtccaagatcttcttgaaggttgtgaactgcctgacctcccctctagccttctgctcccagaggacatggctcttcgtaacctgcccccgctccgagctgcccacagacgctttaactttgacacggatcggcccctgctcagcaccttagaggagtcagtggtgcgcatctgctgcatccgcagctttggtcatttcatcgcccgcctgcaaggcagcatcctgcagttcaacccagaggttggcatcttcgtcagcattgcccagtctgagcaggagagcctgctgcagcaggcccaggcacagttccgaatggcacaggaggaagctcgtcggaacaggctcatgagagacatggctcagctacgacttcagctcgaagtgtctcagctggagggcagcctgcagcagcccaaggcccagtcagccatgtctccctacctcgtccctgacacccaggccctctgccaccatctccctgtcatccgccaactggccaccagtggccgcttcattgtcatcatcccaaggacagtgatcgatggcctggatttgctgaagaaggaacacccaggggcccgggatgggattcggtacctggaggcagagtttaaaaaaggaaacaggtacattcgctgccagaaagaggtgggaaagagctttgagcggcataagctgaagaggcaggatgcagatgcctggactctctataagatcctagacagctgcaaacagctgactctggcccagggggcaggtgaggaggatccgagtggcatggtgaccatcatcacaggccttccactggacaaccccagcgtgctttcaggccccatgcaggcagccctgcaggccgctgcccacgccagtgtggacatcaagaatgttctggacttctacaagcagtggaaggaaattggttga

SEQ ID NO: 597 - DNA, 6120 bp, Homo Sapiens
atggatatagttgatacatttaatcatttaattcctactgaacacttagatgatgccctatttctaggatccaacctggagaatgaagtctgtgaggattttagtgcaagtcaaaatgtcttagaggactcgctgaagaacatgctcagcgataaggatcctatgctaggatctgcaagtaaccagttctgtttgcctgttttggatagcaatgatcccaatttccagatgccttgttcaacagttgttggtcttgacgatattatggatgaaggagttgttaaagaaagtggcaatgataccattgatgaagaagaactgattttacctaacaggaacttaagggacaaggtagaagaaaattcagtgagatctccaagaaaatcacctcgtttaatggcacaagaacaagtaagaagtttgcgacagagcactattgccaagcgttcaaatgcagcaccattaagtaacacaaaaaaagcatctgggaagactgtatctactgctaaagcaggagtgaaacaaccagaaaggagtcaggttaaagaagaagtatgtatgtcactgaaacctgagtaccataaggagaatagaaggtgcagccgaaatagcggacaaattgaagtggtacctgaagtatcagtgtcttcaagtcattcttcagtgtcatcttgtcttgaaatgaaggatgaagatggattagattctaagcataagtgtaataatccgggagaaatagatgtgccatctcatgaattaaattgttcacttctttcagagacttgtgttactattggagaaaagaaaaatgaagctttgatggaatgtaaagccaagcctgttggtagtccattgtttaagttttcagataaagaagaacatgaacaaaatgattccatttcaggtaaaacgggtgagactgttgttgaagaaatgatagcaacaagaaaagttgaacaagattcaaaggagacagtaaaattatcccatgaagatgaccatattcttgaggacgctggatcttctgatatttctagtgatgctgcttgtacaaatccaaataagacagaaaacagccttgtaggtttgcctagttgtgtagatgaagtgactgaatgtaatttggaattgaaggataccatgggtattgctgataaaactgagaacacccttgaaagaaataaaattgaaccgttgggttattgtgaagatgcggagtctaataggcagttggagagcactgagtttaataaatcaaacttagaggtggttgatactagtacttttggaccggaaagtaatatcttggaaaatgctatttgtgatgtgcctgaccaaaattcaaaacagttgaatgctatagaaagtactaaaatagagtcccatgaaacagcaaaccttcaggatgacagaaacagccagtcaagtagcgtttcttacttagagtcaaaaagtgtaaaatccaaacatacaaaacctgtaattcattctaagcaaaacatgaccacagatgctccgaagaaaattgttgcagcaaagtatgaagtaatacatagcaaaactaaagttaatgtcaaaagtgtgaaacgaaatactgatgtaccagaatctcagcaaaattttcataggccagtcaaagtcagaaaaaaacaaattgataaggagccaaagattcagagttgcaattctggggttaaatctgtgaaaaaccaagctcattctgtactgaaaaaaacattacaggatcaaactttagtacaaattttcaagcccttaactcattctttgagtgataagtcacacgctcatcctggttgcttgaaagaacctcatcatcctgcacaaactggacatgtatcacattctagccagaaacagtgtcataagcctcagcaacaggccccagcaatgaaaaccaatagtcacgtgaaggaagagcttgaacacccaggcgttgagcattttaaggaagaggataaactgaaactgaaaaaacctgagaagaacctacaaccccgccaaagaagaagcagcaaaagtttttctttagatgagccaccattgttcattccagataacatagctaccataagaagagaaggctctgatcatagctcctcatttgaaagcaaatatatgtggactcccagcaagcagtgtgggttttgcaaaaaaccacatggcaacaggtttatggttggctgtgggagatgtgatgactggtttcatggtgattgtgttgggttaagtctttctcaagcacagcagatgggcgaggaagacaaagaatatgtctgtgtaaaatgttgtgctgaagaagacaaaaagactgaaatactagatccagatactttggaaaaccaagctacagttgaattccatagtggagataaaacaatggagtgtgaaaagcttggattatcaaaacacacaacaaatgatagaaccaaatatatagatgatacagtgaagcacaaggtcaaaattttaaaacgggagtctggtgaaggcagaaattcatcagactgtagagataatgaaattaaaaaatggcagctagctcctcttcgtaagatgggacaaccagttttacctcggagatcctcagaagaaaaaagtgaaaaaataccgaaagagtctacaactgttacttgcacaggagaaaaagcttcaaaaccaggtactcatgagaagcaagagatgaaaaagaagaaagttgaaaaaggagtgcttaatgtacatcctgctgcttctgcttccaagccttctgcagatcagatcaggcaaagtgtcagacattctctcaaagacattcttatgaagagacttacagactcaaatttgaaggtaccagaggaaaaggcagcaaaagttgccacaaaaattgagaaagagcttttctctttttttcgggacacagatgctaaatataagaacaaatatagaagtttgatgtttaatttgaaagatcctaaaaacaatatattatttaaaaaagtactgaaaggagaagtaactcctgatcatcttatcagaatgagtccagaagaactagcttctaaagagttagctgcttggagacgaagagaaaacagacataccatagaaatgattgagaaagagcagagagaagtggaacgacggccaatcaccaaaataactcataaaggtgaaatagaaattgagagtgatgccccaatgaaagaacaggaagcagccatggagattcaggaaccagccgccaataagtcattggagaagccagaaggatctgaaaaacaaaaagaggaggttgactctatgtctaaagataccactagtcaacacagacagcatctttttgatctcaactgcaaaatctgcataggtcgaatggcaccacctgtagatgatctttctccaaaaaaagtaaaagttgttgtaggagtagctcgcaaacattcagacaatgaagcagaaagtatagcagatgcattatcttcaacctcaaatattttggcttctgaattctttgaggaggagaaacaggagtctccaaagtcaacgttctctcctgctccacgtccagagatgcctggaactgttgaagttgagtctacctttctggctcgattgaacttcatctggaaaggttttatcaacatgccttctgtggcaaaatttgttaccaaagcctatccagtatctggctccccagaatacctgacagaggacctaccagatagtattcaagtaggtggcaggatatcacctcagacagtttgggattatgtggaaaaaataaaagcatcaggaaccaaggaaatttgtgtggttcgcttcacaccagtaactgaagaagatcaaatttcttatactttgctctttgcatacttcagtagcagaaagcgctatggagtagctgctaacaacatgaagcaggttaaagatatgtaccttattcctttgggtgccacagataaaattccacaccctcttgtgccttttgatggacctgggcttgaactgcatagacctaatctattgttgggcttaattattcgtcagaaactgaagcgacagcacagtgcctgtgctagtactagtcatatagctgagactcctgaaagtgcaccaccaatagcattgccacctgataaaaaaagtaaaatagaagtttctacagaagaagcaccagaggaagaaaatgacttttttaattcttttacaactgtattacacaagcagagaaataaacctcagcagaatcttcaggaagaccttccaacagcagttgaacctttaatggaagtcaccaaacaggagccaccaaaacctttaagatttcttcctggcgtgttgattggctgggagaatcaacctactactctggaattagcaaataaacctcttcctgtggatgatatacttcaaagccttttgggcaccactggtcaagtatatgaccaggcccagtcagtgatggaacaaaacactgttaaagaaattccatttttaaatgagcagaccaactcaaaaatagagaaaacagataatgtggaagtaactgatggtgaaaacaaggagataaaagttaaagtagataatatttcagaatctacagataagtcagcagaaatagaaacatcagtagtagggtcctcttccatttctgcagggtctttgacgagtcttagtctcagaggtaagccaccagatgtttctacagaagcatttttaacaaatttatcaattcagtcaaaacaagaggaaactgtggagagtaaagagaaaacattaaaaagacagcttcaggaagatcaagagaataatttgcaagataaccagacttcaaatagttctccatgcagatctaatgtaggaaaaggaaacatagatggtaatgtgagctgtagtgaaaaccttgttgctaatacagcgaggtctccacagtttatcaacctgaaaagggatcctaggcaagcagcaggacgaagtcagcctgtaactacttcagaaagcaaagatggagatagttgccggaatggagaaaaacacatgctgcctggcctgtcacacaacaaggagcacttaacagaacaaatcaatgtagaggaaaagttgtgttctgcagagaaaaactcgtgtgttcagcagagtgacaatttaaaagttgcacaaaactcaccatcagtagaaaacatacagacttctcaagcagaacaagcaaaacccttacaggaggatattttaatgcaaaatattgaaactgtgcacccatttcgaagaggatcagcagtagcgacatctcattttgaagttggaaacacatgtccatcagaatttccttctaaaagcatcacctttacttccagaagcaccagccccagaacaagtacaaacttttcacccatgaggccacagcagcccaaccttcagcatctcaagtctagcccacctggatttccatttccagggcctcctaattttcccccacaaagcatgtttggatttccaccacatttgccacctccattacttccccctccaggctttggctttgctcaaaatcccatggttccctggccacctgttgttcatctcccaggtcagccacagcgtatgatgggtcctctctcacaagcatcaaggtatataggcccgcagaatttttaccaggttaaagacattcggaggccagaaaggcgccatagtgacccttggggtaggcaagaccaacagcaactggataggccatttaataggggtaaaggggaccgccagagattttatagtgattcacaccatttgaaaagagagcgacatgaaaaggaatgggagcaagaatctgaaaggcatagacgcagagacagaagccaagacaaggacagagacagaaaaagcagggaggaagggcacaaagataaagagagggcacggttatcacatggtgatcgaggaacagatggaaaagcaagcagagatagtaggaatgtagacaagaagccagataaacctaaaagtgaagactatgagaaggacaaagaacgagagaaaagtaaacacagagaaggagaaaaggacagggataggtaccacaaagatagggaccacactgacagaactaaaagcaaaaggtaa

SEQ ID NO: 598 - DNA, 1674 bp, Homo Sapiens
atggactcggacgagggctacaactacgagttcgacgaggacgaggagtgcagtgaggaggacagcggcgccgaggaggaggaggacgaagacgacgacgagccggacgatgataccctggatctgggcgaggtggagctggtggagcccgggctgggcgtcggcggggagcgggacggactgctgtgcggggagacgggcggtggcggcggcagcgctctggggcccggcggtggcggcggcggcggcggcggcggtggtggtggcgggccggggcatgagcaggaggaggattaccgctacgaggtgctcacggccgagcagattctacaacacatggtggaatgtatccgggaggtcaacgaggtcatccagaatccagcaactatcacaagaatactccttagccacttcaattgggataaagagaagctaatggaaaggtactttgatggaaacctggagaagctctttgctgagtgtcatgtaattaatccaagtaaaaagtctcgaacacgccagatgaatacaaggtcatcagcacaggatatgccttgtcagatctgctacttgaactaccctaactcgtatttcactggccttgaatgtggacataagttttgtatgcagtgctggagtgaatatttaactaccaaaataatggaagaaggcatgggtcagactatttcgtgtcctgctcatggttgtgatatcttagtggatgacaacacagttatgcgcctgatcacagattcaaaagttaaattaaagtatcagcatttaataacaaatagctttgtagagtgcaatcgactgttaaagtggtgtcctgccccagattgccaccatgttgttaaagtccaatatcctgatgctaaacctgttcgctgcaaatgtgggcgccaattttgctttaactgtggagaaaattggcatgatcctgttaaatgtaagtggttaaagaaatggattaaaaagtgtgatgatgacagtgaaacctccaattggattgcagccaacacaaaggaatgtcccaaatgccatgtcacaattgagaaggatggtggttgtaatcacatggtctgtcgtaaccagaattgtaaagcagagttttgctgggtgtgtcttggcccatgggaaccacatggatctgcctggtacaactgtaaccgctataatgaggatgatgcaaaggcagcaagagatgcacaggagcgatctagggcagccctgcagaggtacctgttctactgtaatcgctatatgaaccacatgcagagcctgcgctttgagcacaaactatatgctcaggtgaaacagaaaatggaggagatgcagcagcacaacatgtcctggattgaggtgcagttcctgaagaaggcagttgatgtcctctgccagtgtcgtgccacactcatgtacacttatgtcttcgctttctacctcaaaaagaataaccagtccattatctttgagaataaccaagcagatctagagaatgccacagaggtgctctcgggctaccttgaacgagatatttcccaagattctctgcaggatataaagcagaaagtacaagacaagtacagatactgtgagagtcgacgaagggttttgttacagcatgtgcatgaaggctatgaaaaagatctgtgggagtacattgaggactga

SEQ ID NO: 599 - DNA, 2514 bp, Homo Sapiens
atgacgactttcggcgccgtggcggaatggcggcttccatctctgaggcgagcgacgctatggatcccacagtggtttgctaagaaggccattttcaactctccactggaggctgctatggcgttccctcacctgcagcagcccagctttctactggctagcctgaaagctgactctataaataagccctttgcacagcagtgccaagacttggttaaagtcattgaggactttccagcaaaggagctgcacaccatcttcccatggctggtagaaagcatttttggcagcctagatggtgtcctcgttggctggaacctccgctgcttacaggggcgcgtgaatcctgtggagtacagcatcgtgatggaatttctcgaccctggtggcccaatgatgaagttggtttataagcttcaagctgaagactataagttcgactttcctgtctcctacttgcctggtcctgtgaaggcgtccatccaggagtgcatcctccctgacagtcctctgtaccacaacaaggtccagttcacccctactgggggccttggtctgaacttggccctgaatccgttcgagtattacatattcttctttgccttgagcctcatcactcagaagccacttcctgtgtccctccacgtccgtacttcagactgtgcctatttcatcctggtggacaggtacctgtcatggttcctgcccaccgaaggcagtgtgcccccaccactctcctccagcccaggggggaccagcccctcaccacctcccaggacaccagccataccctttgcttcctatggcctccaccacactagcctcctaaagcgacacatctctcatcagacgtctgtgaatgcagaccccgcctcccacgagatctggaggtcagaaactctgctccaggtttttgttgaaatgtggcttcatcactattccttggagatgtatcaaaaaatgcagtcccctcatgccaaggagtcgttcacgcctactgaggagcatgtgttggtggtgcgcctgctgctgaagcacctgcacgcctttgccaacagcctgaagccagagcaggcctcaccctccgcccactcccacgccaccagccccctggaggagttcaaacgggctgctgtcccgaggttcgtccagcagaaactctacctcttcttgcagcattgctttggccactggcccctggacgcatcgttcagagctgtcctggagatgtggctgagctacctgcagccgtggcggtacgcgcctgacaagcaggctccgggcagcgactcccagccccggtgtgtgtcggagaaatgggcaccctttgtccaggagaacctgctgatgtacaccaagttgtttgtgggctttctgaaccgcgcgctccgcacagacctggtcagccccaagcacgcgctcatggtgttccgagtggccaaagtctttgcccagcccaacctggctgagatgattcagaaaggtgagcagctattcctggagccagagctggtcatcccccaccgccagcaccgactcttcacggcccccacattcactgggagcttcctgtcaccctggccaccagcggtcactgatgcctccttcaaggtgaagagccacgtctacagcctggagggccaggactgcaagtacaccccgatgtttgggcccgaggcccgcaccctggtcctgcgcctcgctcagctcatcacacaggccaaacacacagccaagtccatctccgaccagtgtgcggagagcccggctggccactccttcctctcatggctgggctttagctccatggacaccaatggctcctacacagccaacgacctggacgagatggggcaagacagtgtccggaagacagatgaatacctggagaaggccctggagtacctgcgccagatattccggctcagcgaagcgcagctcaggcagttcacactcgccttgggcaccacccaggatgagaatggaaaaaagcaactccccgactgcatcgtgggtgaggacggactcatccttacgcccctggggcggtaccagatcatcaatgggctgcgaaggtttgaaattgagtaccagggggacccggagctgcagcccatccggagctatgagatcgccagcttggtccgcacactctttaggctgtcgtctgccatcaaccacagatttgcaggacagatggcggctctgtgttcccgggatgacttcctcggcagcttctgtcgctaccacctcacagaacctgggctggccagcaggcacctgctgagccctgtggggcggaggcaggtggccggccacacccgcggccccaggctcagcctgcgcttcctgggcagttaccggacgctggtctcgctgctgctggccttcttcgtggcctctctgttctgcgtcgggcccctcccatgcacgctgctgctcaccctgggctatgtcctctacgcctctgccatgacactgctgaccgagcgggggaagctgcaccagccctga

SEQ ID NO: 600 - DNA, 774 bp, Homo Sapiens
atgccggcccgttgtgtggccgcccactgcggcaacaccaccaagtctgggaagtcgctgttccgctttcccaaggaccgggccgtgcggctgctctgggaccgcttcgtgcggggttgccgcgccgactggtacggaggcaatgaccgctcggtcatctgctctgaccactttgccccagcctgttttgacgtctcttcggttatccagaagaacctgcgcttctcccagcgcctgaggctggtggcaggcgccgtgcccaccctgcaccgggtgcccgccccggcacctaagaggggagaggagggagaccaagcaggccgcctggacacgcgaggagagctccaggcagccaggcattctgaggctgccccaggtccagtctcctgtacacgcccccgagctgggaagcaggctgcagcttcacagattacgtgtgaaaatgaacttgtgcaaacccaaccccatgctgataatccatctaatactgtcacttcagtacctactcactgtgaagaaggcccagtgcataaaagtacacaaatttctttgaaaaggccccgtcaccgtagtgtgggtattcaagccaaagtgaaagcgtttggaaaaagactgtgtaatgcaactactcagacagaggaattgtggtctagaacttcctctctctttgacatttactccagtgattcagaaacagatacagactgggatatcaagagtgaacagagtgatttgtcttatatggctgtacaggtgaaagaagaaacatgttaa

SEQ ID NO: 601 - DNA, 1080 bp, Homo Sapiens
atggcggcgactctgggaccccttgggtcgtggcagcagtggcggcgatgtttgtcggctcgggatgggtccaggatgttactccttcttcttttgttggggtctgggcaggggccacagcaagtcggggcgggtcaaacgttcgagtacttgaaacgggagcactcgctgtcgaagccctaccagggtgtgggcacaggcagttcctcactgtggaatctgatgggcaatgccatggtgatgacccagtatatccgccttaccccagatatgcaaagtaaacagggtgccttgtggaaccgggtgccatgtttcctgagagactgggagttgcaggtgcacttcaaaatccatggacaaggaaagaagaatctgcatggggatggcttggcaatctggtacacaaaggatcggatgcagccagggcctgtgtttggaaacatggacaaatttgtggggctgggagtatttgtagacacctaccccaatgaggagaagcagcaagaggcccagaagaggcgatattctccaggagtccagcgggtattcccctacatctcagccatggtgaacaacggctccctcagctatgatcatgagcgggatgggcggcctacagagctgggaggctgcacagccattgtccgcaatcttcattacgacaccttcctggtgattcgctacgtcaagaggcatttgacgataatgatggatattgatggcaagcatgagtggagggactgcattgaagtgcccggagtccgcctgccccgcggctactacttcggcacctcctccatcactggggatctctcagataatcatgatgtcatttccttgaagttgtttgaactgacagtggagagaaccccagaagaggaaaagctccatcgagatgtgttcttgccctcagtggacaatatgaagctgcctgagatgacagctccactgccgcccctgagtggcctggccctcttcctcatcgtctttttctccctggtgttttctgtatttgccatagtcattggtatcatactctacaacaaatggcaggaacagagccgaaagcgcttctactga

SEQ ID NO: 602 - DNA, 1587 bp, Homo Sapiens
atggccgagcacctggagctgctggcagagatgcccatggtgggcaggatgagcacacaggagcggctgaagcatgcccagaagcggcgcgcccagcaggtgaagatgtgggcccaggctgagaaggaggcccagggcaagaagggtcctggggagcgtccccggaaggaggcagccagccaagggctcctgaagcaggtcctcttccctcccagtgttgtccttctggaggccgctgcccgaaatgacctggaagaagtccgccagttccttgggagtggggtcagccctgacttggccaacgaggacggcctgacggccctgcaccagtgctgcattgatgatttccgagagatggtgcagcagctcctggaggctggggccaacatcaatgcctgtgacagtgagtgctggacgcctctgcatgctgcggccacctgcggccacctgcacctggtggagctgctcatcgccagtggcgccaatctcctggcggtcaacaccgacgggaacatgccctatgacctgtgtgatgatgagcagacgctggactgcctggagactgccatggccgaccgtggcatcacccaggacagcatcgaggccgcccgggccgtgccagaactgcgcatgctggacgacatccggagccggctgcaggccggggcagacctccatgcccccctggaccacggggccacgctgctgcacgtcgcagccgccaacgggttcagcgaggcggctgccctgctgctggaacaccgagccagcctgagcgctaaggaccaagacggctgggagccgctgcacgccgcggcctactggggccaggtgcccctggtggagctgctcgtggcgcacggggccgacctgaacgcaaagtccctgatggacgagacgccccttgatgtgtgcggggacgaggaggtgcgggccaagctgctggagctgaagcacaagcacgacgccctcctgcgcgcccagagccgccagcgctccttgctgcgccgccgcacctccagcgccggcagccgcgggaaggtggtgaggcgggtgagcctaacccagcgcaccgacctgtaccgcaagcagcacgcccaggaggccatcgtgtggcaacagccgccgcccaccagcccggagccgcccgaggacaacgatgaccgccagacaggcgcagagctcaggccgccgcccccggaggaggacaaccccgaagtggtcaggccgcacaatggccgagtagggggctccccagtgcggcatctatactccaagcgactagaccggagtgtctcctaccagctgagccccctggacagcaccaccccccacaccctggtccacgacaaggcccaccacaccctggctgacctgaagcgccagcgagctgctgccaagctgcagcgacccccacctgaggggcccgagagccctgagacagctgagcctggcctgcctggtgacacggtgaccccccagcctgactgtggcttcagggcaggcggggacccacccctgctcaagctcacagccccggcggtggaggctcccgtggagaggaggccgtgctgcctgctcatgtga

SEQ ID NO: 603 - DNA, 1614 bp, Homo Sapiens
atggagggactcttgagcgtcgccctccagggcgcagagttggaaggaaactggaaacacgagggccaggttgaggacctgcaggaaaaccaggaaagctgtccagagccagaggccgtggcctgcaagggagaccctgctggggacagcatgcaggaacgcgatgaattcagccgaatcccaagaaccatatcgagccctgctgctacccaagccagtgtccccgacgacagcagttcccggaggtgcagcgcgcctggggagagcccgaaggagaggcatcctgacagccgccagcgggagagaggtggaggccccaagaagccgtggaaatgcggggactgcgggaaggccttcagctactgttcagcgttcatcttacaccagagaatccacaccggggagaagccatttgcgtgccccgagtgcggcaaggccttcagccagagcgtgcacctgaccctgcaccagcgcacgcacacgggcgagaagccctacgcctgccacgagtgcggcaaggccttcagccagggctcgtacctggcgtcccactggcgcacgcacacgggcgagaagccgcaccgctgcgccgactgcggcaaggccttcacgcgcgtcacgcacctgacccagcaccggcgcgtgcacacgggcgagcggccctacgcgtgcgcccagtgcgccaaggcgttccgcaaccgctcgtccctgatagagcaccagcgcatccacaccggtgagaagccctacgagtgctccgcgtgcgccaaggccttccgcttctcctcagcgctcatccgccaccagcgcatccacacggaggagaagccctaccgctgcggccagtgcgccaaggccttcgcgcagatcgcgcacctgacccagcaccggcgcgtgcacacgggcgagaagccctacacgtgccaggactgcggcgcgctcttcagccagagcgcctctctggccgagcaccggcgcatccacacaggcgagaagccctacgcgtgcggccagtgcgccaaggccttcacccaggtgtcgcacctgacgcagcaccagcgcacgcacaccggagagcggccttacccctgccacgactgcggcaagcgcttcagcaaccgctcccacctcctccagcaccgcctcgtgcacaccggtgagcggccctacaggtgcctgcaatgcggggccgccttcagccacgtgtcctcgcttatagagcaccagaagatccacaccggagagcggccctacaagtgcggcgagtgcggcaaagctttcagccagggctcctcgctcgccctgcaccagcgcacgcacacgggcgagcggccctacacctgccccgagtgcggcaaggccttcagcaaccgctcctacctgatccagcaccacatcgtgcacaccggggagaagccctacgagtgcagcggctgcgggaaggccttcagcttctcctccgcgctcatccgacaccagaggacgcatgcagacagttcgggacgcctttgcccagctcccacgcctgactcaacacctgggctctcacagggaggagaaacctgtcaacaggggtgccctggcagaaacccgcgtggaccagcagaagattaa

SEQ ID NO: 604 - DNA, 8532 bp, Homo Sapiens
atggctgcagcttcatatgatcagttgttaaagcaagttgaggcactgaagatggagaactcaaatcttcgacaagagctagaagataattccaatcatcttacaaaactggaaactgaggcatctaatatgaaggaagtacttaaacaactacaaggaagtattgaagatgaagctatggcttcttctggacagattgatttattagagcgtcttaaagagcttaacttagatagcagtaatttccctggagtaaaactgcggtcaaaaatgtccctccgttcttatggaagccgggaaggatctgtatcaagccgttctggagagtgcagtcctgttcctatgggttcatttccaagaagagggtttgtaaatggaagcagagaaagtactggatatttagaagaacttgagaaagagaggtcattgcttcttgctgatcttgacaaagaagaaaaggaaaaagactggtattacgctcaacttcagaatctcactaaaagaatagatagtcttcctttaactgaaaatttttccttacaaacagatatgaccagaaggcaattggaatatgaagcaaggcaaatcagagttgcgatggaagaacaactaggtacctgccaggatatggaaaaacgagcacagcgaagaatagccagaattcagcaaatcgaaaaggacatacttcgtatacgacagcttttacagtcccaagcaacagaagcagagaggtcatctcagaacaagcatgaaaccggctcacatgatgctgagcggcagaatgaaggtcaaggagtgggagaaatcaacatggcaacttctggtaatggtcagggttcaactacacgaatggaccatgaaacagccagtgttttgagttctagtagcacacactctgcacctcgaaggctgacaagtcatctgggaaccaaggtggaaatggtgtattcattgttgtcaatgcttggtactcatgataaggatgatatgtcgcgaactttgctagctatgtctagctcccaagacagctgtatatccatgcgacagtctggatgtcttcctctcctcatccagcttttacatggcaatgacaaagactctgtattgttgggaaattcccggggcagtaaagaggctcgggccagggccagtgcagcactccacaacatcattcactcacagcctgatgacaagagaggcaggcgtgaaatccgagtccttcatcttttggaacagatacgcgcttactgtgaaacctgttgggagtggcaggaagctcatgaaccaggcatggaccaggacaaaaatccaatgccagctcctgttgaacatcagatctgtcctgctgtgtgtgttctaatgaaactttcatttgatgaagagcatagacatgcaatgaatgaactagggggactacaggccattgcagaattattgcaagtggactgtgaaatgtatgggcttactaatgaccactacagtattacactaagacgatatgctggaatggctttgacaaacttgacttttggagatgtagccaacaaggctacgctatgctctatgaaaggctgcatgagagcacttgtggcccaactaaaatctgaaagtgaagacttacagcaggttattgcgagtgttttgaggaatttgtcttggcgagcagatgtaaatagtaaaaagacgttgcgagaagttggaagtgtgaaagcattgatggaatgtgctttagaagttaaaaaggaatcaaccctcaaaagcgtattgagtgccttatggaatttgtcagcacattgcactgagaataaagctgatatatgtgctgtagatggtgcacttgcatttttggttggcactcttacttaccggagccagacaaacactttagccattattgaaagtggaggtgggatattacggaatgtgtccagcttgatagctacaaatgaggaccacaggcaaatcctaagagagaacaactgtctacaaactttattacaacacttaaaatctcatagtttgacaatagtcagtaatgcatgtggaactttgtggaatctctcagcaagaaatcctaaagaccaggaagcattatgggacatgggggcagttagcatgctcaagaacctcattcattcaaagcacaaaatgattgctatgggaagtgctgcagctttaaggaatctcatggcaaataggcctgcgaagtacaaggatgccaatattatgtctcctggctcaagcttgccatctcttcatgttaggaaacaaaaagccctagaagcagaattagatgctcagcacttatcagaaacttttgacaatatagacaatttaagtcccaaggcatctcatcgtagtaagcagagacacaagcaaagtctctatggtgattatgtttttgacaccaatcgacatgatgataataggtcagacaattttaatactggcaacatgactgtcctttcaccatatttgaatactacagtgttacccagctcctcttcatcaagaggaagcttagatagttctcgttctgaaaaagatagaagtttggagagagaacgcggaattggtctaggcaactaccatccagcaacagaaaatccaggaacttcttcaaagcgaggtttgcagatctccaccactgcagcccagattgccaaagtcatggaagaagtgtcagccattcatacctctcaggaagacagaagttctgggtctaccactgaattacattgtgtgacagatgagagaaatgcacttagaagaagctctgctgcccatacacattcaaacacttacaatttcactaagtcggaaaattcaaataggacatgttctatgccttatgccaaattagaatacaagagatcttcaaatgatagtttaaatagtgtcagtagtagtgatggttatggtaaaagaggtcaaatgaaaccctcgattgaatcctattctgaagatgatgaaagtaagttttgcagttatggtcaatacccagccgacctagcccataaaatacatagtgcaaatcatatggatgataatgatggagaactagatacaccaataaattatagtcttaaatattcagatgagcagttgaactctggaaggcaaagtccttcacagaatgaaagatgggcaagacccaaacacataatagaagatgaaataaaacaaagtgagcaaagacaatcaaggaatcaaagtacaacttatcctgtttatactgagagcactgatgataaacacctcaagttccaaccacattttggacagcaggaatgtgtttctccatacaggtcacggggagccaatggttcagaaacaaatcgagtgggttctaatcatggaattaatcaaaatgtaagccagtctttgtgtcaagaagatgactatgaagatgataagcctaccaattatagtgaacgttactctgaagaagaacagcatgaagaagaagagagaccaacaaattatagcataaaatataatgaagagaaacgtcatgtggatcagcctattgattatagtttaaaatatgccacagatattccttcatcacagaaacagtcattttcattctcaaagagttcatctggacaaagcagtaaaaccgaacatatgtcttcaagcagtgagaatacgtccacaccttcatctaatgccaagaggcagaatcagctccatccaagttctgcacagagtagaagtggtcagcctcaaaaggctgccacttgcaaagtttcttctattaaccaagaaacaatacagacttattgtgtagaagatactccaatatgtttttcaagatgtagttcattatcatctttgtcatcagctgaagatgaaataggatgtaatcagacgacacaggaagcagattctgctaataccctgcaaatagcagaaataaaagaaaagattggaactaggtcagctgaagatcctgtgagcgaagttccagcagtgtcacagcaccctagaaccaaatccagcagactgcagggttctagtttatcttcagaatcagccaggcacaaagctgttgaattttcttcaggagcgaaatctccctccaaaagtggtgctcagacacccaaaagtccacctgaacactatgttcaggagaccccactcatgtttagcagatgtacttctgtcagttcacttgatagttttgagagtcgttcgattgccagctccgttcagagtgaaccatgcagtggaatggtaagtggcattataagccccagtgatcttccagatagccctggacaaaccatgccaccaagcagaagtaaaacacctccaccacctcctcaaacagctcaaaccaagcgagaagtacctaaaaataaagcacctactgctgaaaagagagagagtggacctaagcaagctgcagtaaatgctgcagttcagagggtccaggttcttccagatgctgatactttattacattttgccacggaaagtactccagatggattttcttgttcatccagcctgagtgctctgagcctcgatgagccatttatacagaaagatgtggaattaagaataatgcctccagttcaggaaaatgacaatgggaatgaaacagaatcagagcagcctaaagaatcaaatgaaaaccaagagaaagaggcagaaaaaactattgattctgaaaaggacctattagatgattcagatgatgatgatattgaaatactagaagaatgtattatttctgccatgccaacaaagtcatcacgtaaagcaaaaaagccagcccagactgcttcaaaattacctccacctgtggcaaggaaaccaagtcagctgcctgtgtacaaacttctaccatcacaaaacaggttgcaaccccaaaagcatgttagttttacaccgggggatgatatgccacgggtgtattgtgttgaagggacacctataaacttttccacagctacatctctaagtgatctaacaatcgaatcccctccaaatgagttagctgctggagaaggagttagaggaggggcacagtcaggtgaatttgaaaaacgagataccattcctacagaaggcagaagtacagatgaggctcaaggaggaaaaacctcatctgtaaccatacctgaattggatgacaataaagcagaggaaggtgatattcttgcagaatgcattaattctgctatgcccaaagggaaaagtcacaagcctttccgtgtgaaaaagataatggaccaggtccagcaagcatctgcgtcttcttctgcacccaacaaaaatcagttagatggtaagaaaaagaaaccaacttcaccagtaaaacctataccacaaaatactgaatataggacacgtgtaagaaaaaatgcagactcaaaaaataatttaaatgctgagagagttttctcagacaacaaagattcaaagaaacagaatttgaaaaataattccaaggtcttcaatgataagctcccaaataatgaagatagagtcagaggaagttttgcttttgattcacctcatcattacacgcctattgaaggaactccttactgtttttcacgaaatgattctttgagttctctagattttgatgatgatgatgttgacctttccagggaaaaggctgaattaagaaaggcaaaagaaaataaggaatcagaggctaaagttaccagccacacagaactaacctccaaccaacaatcagctaataagacacaagctattgcaaagcagccaataaatcgaggtcagcctaaacccatacttcagaaacaatccacttttccccagtcatccaaagacataccagacagaggggcagcaactgatgaaaagttacagaattttgctattgaaaatactccggtttgcttttctcataattcctctctgagttctctcagtgacattgaccaagaaaacaacaataaagaaaatgaacctatcaaagagactgagccccctgactcacagggagaaccaagtaaacctcaagcatcaggctatgctcctaaatcatttcatgttgaagataccccagtttgtttctcaagaaacagttctctcagttctcttagtattgactctgaagatgacctgttgcaggaatgtataagctccgcaatgccaaaaaagaaaaagccttcaagactcaagggtgataatgaaaaacatagtcccagaaatatgggtggcatattaggtgaagatctgacacttgatttgaaagatatacagagaccagattcagaacatggtctatcccctgattcagaaaattttgattggaaagctattcaggaaggtgcaaattccatagtaagtagtttacatcaagctgctgctgctgcatgtttatctagacaagcttcgtctgattcagattccatcctttccctgaaatcaggaatctctctgggatcaccatttcatcttacacctgatcaagaagaaaaaccctttacaagtaataaaggcccacgaattctaaaaccaggggagaaaagtacattggaaactaaaaagatagaatctgaaagtaaaggaatcaaaggaggaaaaaaagtttataaaagtttgattactggaaaagttcgatctaattcagaaatttcaggccaaatgaaacagccccttcaagcaaacatgccttcaatctctcgaggcaggacaatgattcatattccaggagttcgaaatagctcctcaagtacaagtcctgtttctaaaaaaggcccaccccttaagactccagcctccaaaagccctagtgaaggtcaaacagccaccacttctcctagaggagccaagccatctgtgaaatcagaattaagccctgttgccaggcagacatcccaaataggtgggtcaagtaaagcaccttctagatcaggatctagagattcgaccccttcaagacctgcccagcaaccattaagtagacctatacagtctcctggccgaaactcaatttcccctggtagaaatggaataagtcctcctaacaaattatctcaacttccaaggacatcatcccctagtactgcttcaactaagtcctcaggttctggaaaaatgtcatatacatctccaggtagacagatgagccaacagaaccttaccaaacaaacaggtttatccaagaatgccagtagtattccaagaagtgagtctgcctccaaaggactaaatcagatgaataatggtaatggagccaataaaaaggtagaactttctagaatgtcttcaactaaatcaagtggaagtgaatctgatagatcagaaagacctgtattagtacgccagtcaactttcatcaaagaagctccaagcccaaccttaagaagaaaattggaggaatctgcttcatttgaatctctttctccatcatctagaccagcttctcccactaggtcccaggcacaaactccagttttaagtccttcccttcctgatatgtctctatccacacattcgtctgttcaggctggtggatggcgaaaactcccacctaatctcagtcccactatagagtataatgatggaagaccagcaaagcgccatgatattgcacggtctcattctgaaagtccttctagacttccaatcaataggtcaggaacctggaaacgtgagcacagcaaacattcatcatcccttcctcgagtaagcacttggagaagaactggaagttcatcttcaattctttctgcttcatcagaatccagtgaaaaagcaaaaagtgaggatgaaaaacatgtgaactctatttcaggaaccaaacaaagtaaagaaaaccaagtatccgcaaaaggaacatggagaaaaataaaagaaaatgaattttctcccacaaatagtacttctcagaccgtttcctcaggtgctacaaatggtgctgaatcaaagactctaatttatcaaatggcacctgctgtttctaaaacagaggatgtttgggtgagaattgaggactgtcccattaacaatcctagatctggaagatctcccacaggtaatactcccccggtgattgacagtgtttcagaaaaggcaaatccaaacattaaagattcaaaagataatcaggcaaaacaaaatgtgggtaatggcagtgttcccatgcgtaccgtgggtttggaaaatcgcctgaactcctttattcaggtggatgcccctgaccaaaaaggaactgagataaaaccaggacaaaataatcctgtccctgtatcagagactaatgaaagttctatagtggaacgtaccccattcagttctagcagctcaagcaaacacagttcacctagtgggactgttgctgccagagtgactccttttaattacaacccaagccctaggaaaagcagcgcagatagcacttcagctcggccatctcagatcccaactccagtgaataacaacacaaagaagcgagattccaaaactgacagcacagaatccagtggaacccaaagtcctaagcgccattctgggtcttaccttgtgacatctgtttaa

SEQ ID NO: 605 - DNA, 1416 bp, Homo Sapiens
atggcagatgaacggaaagatgaagcaaaggcacctcactggacctcagcaccgctaacagaggcatctgcacactcacatccacctgagattaaggatcaaggcggagcaggggaaggacttgtccgaagcgccaatggattcccatacagggaggatgaagagggtgcctttggagagcatgggtcacagggcacctattcaaataccaaagagaatgggatcaacggagagctgacctcagctgacagagaaacagcagaggaggtgtctgcaaggatagttcaagtagtcactgctgaggctgtagcagtcctgaaaggtgaacaagagaaagaagctcaacataaagaccagactgcagctctgcctttagcagctgaagaaacagctaatctgcctccttctccacccccatcacctgcctcagaacagactgtcacagtggaggaagcagcaggtggggaatcagctctggctcccagtgtatttaaacaggcaaaggacaaagtctctgacggagtaaccaagagcccagaaaagcgctcttctctcccaagaccttcctccattctccctcctcggcgaggtgtgtcaggagacagagatgagaattccttctctctcaacagttctatctcttcttcagcacggcggaccaccaggtcagagccaattcgcagagcagggaagagtggtacctcaacacccactacccctgggtctactgccatcactcctggcaccccaccaagttattcttcacgcacaccaggcactcctggaacccctagctatcccaggacccctcacacaccaggaacccccaagtctgccatcttggtgccgagtgagaagaaggtcgccatcatacgtactcctccaaaatctcctgcgactcccaagcagcttcggcttattaaccaaccactgccagacctgaagaatgtcaaatccaaaatcggatcaacagacaacatcaaataccagcctaaaggggggcaggtacaaattgttaccaagaaaatagacctaagccatgtgacatccaaatgtggctctctgaagaacatccgccacaggccaggtggcggacgtgtgaaaattgagagtgtaaaactagatttcaaagaaaaggcccaagctaaagttggttctcttgataatgctcatcatgtacctggaggtggtaatgtcaagattgacagccaaaagttgaacttcagagagcatgctaaagcccgtgtggaccatggggctgagatcattacacagtccccaggcagatccagcgtggcatcaccccgacgactcagcaatgtctcctcgtctggaagcatcaacctgctcgaatctcctcagcttgccactttggctgaggatgtcactgctgcactcgctaagcagggcttgtga

SEQ ID NO: 606 - DNA, 813 bp, Homo Sapiens
atggcctgccgcccgcgaagcccgccgaggcatcagagccgctgcgacggtgacgccagcccgccgtcccccgcgcgatggagcctgggacggaagcgcagagccgacggcaggcgctggaggcccgaagacgccgaggaggcagagcaccgcggcgccgagcgcagacccgagagctttaccactcctgaaggccctaaaccccgttccagatgctctgactgggcaagtgcagttgaagaagatgaaatgaggaccagagttaacaaagaaatggcaagatataaaaggaaactcctcatcaatgactttggaagagagagaaaatcatcatcaggaagttctgattcaaaggagtctatgtctactgtgccggctgactttgagacagatgaaagtgtcctaatgaggagacagaagcagatcaactatgggaagaacacaattgcctacgatcgttatattaaagaagtcccaagacaccttcgacaacctggcattcatcccaagacccctaataaatttaagaagtatagtcgacgttcatgggaccagcaaatcaaactctggaaggtggctctgcatttttgggatcctccagcggaagaaggatgtgatttgcaagaaatacaccctgtagaccttgaatctgcagaaagcagctccgagccccagaccagctctcaggatgactttgatgtgtactctggcacacccaccaaggtgagacacatggacagtcaagtggaggatgagtttgatttggaagcttgtttaactgaacccttgagagacttctcagccatgagctaa

SEQ ID NO: 607 - DNA, 1632 bp, Homo Sapiens
atggagcaggtcaatgagctgaaggagaaaggcaacaaggccctgagcgtgggtaacatcgatgatgccttacagtgctactccgaagctattaagctggatccccacaaccacgtgctgtacagcaaccgttctgctgcctatgccaagaaaggagactaccagaaggcttatgaggatggctgcaagactgtcgacctaaagcctgactggggcaagggctattcacgaaaagcagcagctctagagttcttaaaccgctttgaagaagccaagcgaacctatgaggagggcttaaaacacgaggcaaataaccctcaactgaaagagggtttacagaatatggaggccaggttggcagagagaaaattcatgaaccctttcaacatgcctaatctgtatcagaagttggagagtgatcccaggacaaggacactactcagtgatcctacctaccgggagctgatagagcagctacgaaacaagccttctgacctgggcacgaaactacaagatccccggatcatgaccactctcagcgtcctccttggggtcgatctgggcagtatggatgaggaggaagagattgcaacacctccaccaccaccccctcccaaaaaggagaccaagccagagccaatggaagaagatcttccagagaataagaagcaggcactgaaagaaaaagagctggggaacgatgcctacaagaagaaagactttgacacagccttgaagcattacgacaaagccaaggagctggaccccactaacatgacttacattaccaatcaagcagcggtatactttgaaaagggcgactacaataagtgccgggagctttgtgagaaggccattgaagtggggagagaaaaccgagaagactatcgacagattgccaaagcatatgctcgaattggcaactcctacttcaaagaagaaaagtacaaggatgccatccatttctataacaagtctctggcagagcaccgaaccccagatgtgctcaagaaatgccagcaggcagagaaaatcctgaaggagcaagagcggctggcctacataaaccccgacctggctttggaggagaagaacaaaggcaacgagtgttttcagaaaggggactatccccaggccatgaagcattatacagaagccatcaaaaggaacccgaaagatgccaaattatacagcaatcgagctgcctgctacaccaaactcctggagttccagctggcactcaaggactgtgaggaatgtatccagctggagccgaccttcatcaagggttatacacggaaagccgctgcgctggaagcgatgaaggactacaccaaagccatggatgtgtaccagaaggcgctagacctggactccagctgtaaggaggcggcagacggctaccagcgctgtatgatggcgcagtacaaccggcacgacagccccgaagatgtgaagcgacgagccatggccgaccctgaggtgcagcagatcatgagtgacccagccatgcgccttatcctggaacagatgcagaaggacccccaggcactcagcgaacacttaaagaatcctgtaatagcacagaagatccagaagctgatggatgtgggtctgattgcaattcggtga

SEQ ID NO: 608 - DNA, 2922 bp, Homo Sapiens
atggcgtccatcctggatgagtacgagaactcgctgtcccgctcggccgtcttgcagcccggctgccctagcgtgggcatcccccactcggggtatgtgaatgcccagctggagaaggaagtgcccatcttcacaaagcagcgcattgacttcaccccttccgagcgcattaccagtcttgtcgtctccagcaatcagctgtgcatgagcctgggcaaggatacactgctccgcattgacttgggcaaggcaaatgagcccaaccacgtggagctgggacgtaaggatgacgcaaaagttcacaagatgttccttgaccatactggctctcacctgctgattgccctgagcagcacggaggtcctctacgtgaaccgaaatggacagaaggtacggccactagcacgctggaaggggcagctggtggagagtgtgggttggaacaaggcactgggcacggagagcagcacaggccccatcctggtcgggactgcccaaggccacatctttgaagcagagctctcagccagcgaaggtgggcttttcggccctgctccggatctctacttccgcccattgtacgtgctaaatgaagaagggggtccagcacctgtgtgctcccttgaggccgagcggggccctgatgggcgtagctttgttattgccaccactcggcagcgcctcttccagttcataggccgagcagcagagggggctgaggcccagggtttctcagggctctttgcagcttacacggaccacccacccccattccgtgagtttcccagcaacctgggctacagtgagttggccttctacacccccaagctgcgctccgcaccccgggccttcgcctggatgatgggggatggtgtgttgtatggggcattggactgtgggcgccctgactctctgctgagcgaggagcgagtctgggagtacccagagggggtagggcctggggccagcccacccctagccatcgtcttgacccagttccacttcctgctgctactggcagaccgggtggaggcagtgtgcacactgaccgggcaggtggtgctgcgggatcacttcctggagaaatttgggccgctgaagcacatggtgaaggactcctccacaggccagctgtgggcctacactgagcgggctgtcttccgctaccacgtgcaacgggaggcccgagatgtctggcgcacctatctggacatgaaccgcttcgatctggccaaagagtattgtcgagagcggcccgactgcctggacacggtcctggcccgggaggccgatttctgctttcgccagcgtcgctacctggagagcgcacgctgctatgccctgacccagagctactttgaggagattgccctcaagttcctggaggcccgacaggaggaggctctggctgagttcctgcagcgaaaactggccagtttgaagccagccgaacgtacccaggccacactgctgaccacctggctgacagagctctacctgagccggcttggggctctgcagggcgacccagaggccctgactctctaccgagaaaccaaggaatgctttcgaaccttcctcagcagcccccgccacaaagagtggctctttgccagccgggcctctatccatgagctgctcgccagtcatggggacacagaacacatggtgtactttgcagtgatcatgcaggactatgagcgggtggtggcttaccactgtcagcacgaggcctacgaggaggccctggccgtgctcgcccgccaccgtgacccccagctcttctacaagttctcacccatcctcatccgtcacatcccccgccagcttgtagatgcctggattgagatgggcagccggctggatgctcgtcagctcattcctgccctggtgaactacagccagggtggtgaggtccagcaggtgagccaggccatccgctacatggagttctgcgtgaacgtgctgggggagactgagcaggccatccacaactacctgctgtcactgtatgcccgtggccggccggactcactactggcctatctggagcaggctggggccagcccccaccgggtgcattacgacctcaagtatgcgctgcggctctgcgccgagcatggccaccaccgcgcttgtgtccatgtctacaaggtcctagagctgtatgaggaggccgtggacctggccctgcaggtggatgtggacctggccaagcagtgtgcagacctgcctgaggaggatgaggaattgcgcaagaagctgtggctgaagatcgcacggcacgtggtgcaggaagaggaagatgtacagacagccatggcttgcctggctagctgccccttgctcaagattgaggatgtgctgcccttctttcctgatttcgtcaccatcgaccacttcaaggaggcgatctgcagctcacttaaggcctacaaccaccacatccaggagctgcagcgggagatggaagaggctacagccagtgcccagcgcatccggcgagacctgcaggagctgcggggccgctacggcactgtggagccccaggacaaatgtgccacctgcgacttccccctgctcaaccgccctttttacctcttcctctgtggccatatgttccatgctgactgcctgctgcaggctgtgcgacctggcctgccagcctacaagcaggcccggctggaggagctgcagaggaagctgggggctgctccacccccagccaagggctctgcccgggccaaggaggccgagggtggggctgccacggcagggcccagccgggaacagctcaaggctgacctggatgagttggtggccgctgagtgtgtgtactgtggggagctgatgatccgctctatcgaccggccgttcatcgacccccagcgctacgaggaggagcagctcagttggctgtag

SEQ ID NO: 609 - DNA, 1479 bp, Homo Sapiens
atggagcccagcagcaagaagctgacgggtcgcctcatgctggccgtgggaggagcagtgcttggctccctgcagtttggctacaacactggagtcatcaatgccccccagaaggtgatcgaggagttctacaaccagacatgggtccaccgctatggggagagcatcctgcccaccacgctcaccacgctctggtccctctcagtggccatcttttctgttgggggcatgattggctccttctctgtgggccttttcgttaaccgctttggccggcggaattcaatgctgatgatgaacctgctggccttcgtgtccgccgtgctcatgggcttctcgaaactgggcaagtcctttgagatgctgatcctgggccgcttcatcatcggtgtgtactgcggcctgaccacaggcttcgtgcccatgtatgtgggtgaagtgtcacccacagcccttcgtggggccctgggcaccctgcaccagctgggcatcgtcgtcggcatcctcatcgcccaggtgttcggcctggactccatcatgggcaacaaggacctgtggcccctgctgctgagcatcatcttcatcccggccctgctgcagtgcatcgtgctgcccttctgccccgagagtccccgcttcctgctcatcaaccgcaacgaggagaaccgggccaagagtgtgctaaagaagctgcgcgggacagctgacgtgacccatgacctgcaggagatgaaggaagagagtcggcagatgatgcgggagaagaaggtcaccatcctggagctgttccgctcccccgcctaccgccagcccatcctcatcgctgtggtgctgcagctgtcccagcagctgtctggcatcaacgctgtcttctattactccacgagcatcttcgagaaggcgggggtgcagcagcctgtgtatgccaccattggctccggtatcgtcaacacggccttcactgtcgtgtcgctgtttgtggtggagcgagcaggccggcggaccctgcacctcataggcctcgctggcatggcgggttgtgccatactcatgaccatcgcgctagcactgctggagcagctaccctggatgtcctatctgagcatcgtggccatctttggctttgtggccttctttgaagtgggtcctggccccatcccatggttcatcgtggctgaactcttcagccagggtccacgtccagctgccattgccgttgcaggcttctccaactggacctcaaatttcattgtgggcatgtgcttccagtatgtggagcaactgtgtggtccctacgtcttcatcatcttcactgtgctcctggttctgttcttcatcttcacctacttcaaagttcctgagactaaaggccggaccttcgatgagatcgcttccggcttccggcaggggggagccagccaaagtgacaagacacccgaggagctgttccatcccctgggggctgattcccaagtgtga

SEQ ID NO: 610 - DNA, 507 bp, Homo Sapiens
atgaacagcaaaggtcaatatccaacacagccaacctaccctgtgcagcctcctgggaatccagtataccctcagaccttgcatcttcctcaggctccaccctataccgatgctccacctgcctactcagagctctatcgtccgagctttgtgcacccaggggctgccacagtccccaccatgtcagccgcatttcctggagcctctctgtatcttcccatggcccagtctgtggctgttgggcctttaggttccacaatccccatggcttattatccagtcggtcccatctatccacctggctccacagtgctggtggaaggagggtatgatgcaggtgccagatttggagctggggctactgctggcaacattcctcctccacctcctggatgccctcccaatgctgctcagcttgcagtcatgcagggagccaacgtcctcgtaactcagcggaaggggaacttcttcatgggtggttcagatggtggctacaccatctggtga

SEQ ID NO: 611 - DNA, 3021 bp, Homo Sapiens
atgggcagcgcagaggacgcagtcaaagagaaactgctgtggaacgtgaagaaggaggtgaagcaaatcatggaggaggctgtcaccaggaagtttgtgcatgaagacagcagccacatcattgctttatgtggtgcagtggaggcttgcctcttgcatcagctgagacgccgtgccgctggcttcctgcgcagtgacaagatggcagccctgttcaccaaggtggggaagacgtgcccagtggcgggggagatttgccacaaggtacaggagctgcagcaacaagcagagggcaggaaaccctcaggggtcagccaggaggccctgcggagacagggctcagccagcgggaaggccccggccctcagccctcaggccttgaaacacgtatgggtacgcacggcgctcatcgagaaagttctggacaaggtcgtgcaatacctggcggaaaactgcagcaagtactacgagaaggaggcactgctggcagaccctgtgttcggcccgatcctggcctctcttctagtgggaccctgtgccttggaatacactaagctcaagacagccgatcactactggactgacccctctgctgatgagctggtccagcggcaccgcatccggggtccacctactcgccaggactcccctgcaaagcgcccagccctggggatccggaaacggcactcaagcggcagcgcgtcggaggacaggctggctgcctgtgcccgcgagtgtgtggagtccctgcaccagaactcacggacgcggctgctctatggcaagaaccacgtgctggtgcagccgaaggaggatatggaggcggtccctggctacctctccctgcaccagtctgcagagagcctgactctgaagtggacccccaaccagctcatgaatgggactctgggggactccgagctggaaaagagcgtttactgggactatgccctcgtggtgcccttcagccaggtcgtgtgcatccactgccaccagcaaaagagcggtggcacgcttgtgctggtgagccaggatggcatccagaggccgccgctgcatttcccacagggaggacacctgctgtcctttctgtcctgtctggagaatgggctgctgcctcggggacagctagagcccccgctgtggacccagcaagggaaggggaaagtgttccccaagctacggaaacgaagcagcattcgctccgtggatatggaggagatgggcacggggcgggccaccgactatgtgttccggatcatctaccccggccacaggcacgagcacaacgctggtgacatgatcgagatgcagggctttgggcccagcctgccagcctggcacctggagcccctgtgcagtcagggctcctcctgcctctcctgctcctccagcagctccccacatgcaacccccagccactgtagctgcatccccgaccggttgccgctcaggctactgtgtgagagtatgaagaggcagatcgtgtcccgggccttctacggctggctggcacactgccgccacctgtccacggtgcggacccacctgtcggcgctggtgcaccatagcgttatcccacctgaccggcccccgggggcctccgcgggcctcaccaaggacgtgtggagcaagtatcagaaggacaaaaagaactacaaagagctggagctgctgcggcaagtttactacggaggcatagagcacgagatccgcaaggacgtctggccctttctgcttggccactacaagttcggcatgagcaagaaggagatggagcaggtggacgcagtggtggcagcaaggtaccagcaggtgttggcagagtggaaggcctgcgaggtggtggtgaggcagcgggagcgggaggcccacccagccacacgcaccaagttctcctcaggcagcagcatcgacagccacgtgcagcgcctcatccaccgagactccaccatcagcaacgatgtgtttatctcagtggatgatctggaacccccggagccccaggaccctgaagattccagaccaaaacctgagcaggaagcaggacccgggactccgggcaccgccgtggtggagcagcagcattccgtggagttcgactctccagactcaggactgccctcctctcgcaattactccgtggcctcgggcatccagtcaagcctagatgaggggcagagcgtgggcttcgaagaggaggacggcggtggggaggaaggctccagtgggcccggccctgcagctcacactttgagggagccccaggatcccagccaggagaagcctcaggccggagaactggaggccggagaggagcttgcggctgtgtgtgcggctgcctacactatagaattactggacactgtggccttaaacctgcaccgcatagacaaggatgtgcagaggtgtgaccgcaactactggtacttcacgccccccaacctcgagaggctcagagacgtcatgtgcagctacgtgtgggagcacctggacgtgggctatgtgcagggcatgtgcgatctgctggcgcctctcctggtcaccctcgacaatgatcagctggcctacagctgcttcagccacctcatgaagaggatgagccagaacttccccaacgggggtgccatggacacccactttgccaacatgcgctccctcatccagatcctggactcagagctgtttgagctgatgcatcagaatggagactacacccacttctacttctgttatcgctggttcctgctggattttaagagagaactgctgtatgaggatgtgtttgctgtgtgggaggtgatctgggcagccaggcacatctcatcggagcactttgtcctgttcatcgccctcgccctggtggaggcctaccgagagatcatccgtgacaacaacatggacttcactgacatcatcaagtttttcaatgaacgtgctgagcatcacgatgcccaggagatcctgcggattgcccgggacctcgtccacaaggtgcagatgctcatagagaacaagtga

SEQ ID NO: 612 - DNA, 2937 bp, Homo Sapiens
atgggcacgcgtctgccgctcgtcctgcgccagctccgccgcccgccccagcccccgggccctccgcgccgcctccgtgtgccctgtcgcgctagcagcggcggcggcggaggcggcggcggtggccgggagggcctgcttggacagcggcggccgcaggatggccaggcccggagcagctgcagccccggcggccgaacgcccgcggcgcgggactccatcgtcagagaagtcattcagaattcaaaagaagttctaagtttattgcaagaaaaaaaccctgccttcaagccggttcttgcaattatccaggcaggtgacgacaacttgatgcaggaaatcaaccagaatttggctgaggaggctggtctgaacatcactcacatttgcctccctccagatagcagtgaagccgagattatagatgaaatcttaaagatcaatgaagataccagagtacatggccttgcccttcagatctctgagaacttgtttagcaacaaagtcctcaatgccttgaaaccagaaaaagatgtggatggagtaacagacataaacctggggaagctggtgcgaggggatgcccatgaatgttttgtttcacctgttgccaaagctgtaattgaacttcttgaaaaatcaggtgtcaacctagatggaaagaagattttggtagtgggggcccatgggtctttggaagctgctctacaatgcctgttccagagaaaagggtccatgacaatgagcatccagtggaaaacacgccagcttcaaagcaagcttcacgaggctgacattgtggtcctaggctcacctaagccagaagagattccccttacttggatacaaccaggaactactgttctcaactgctcccatgacttcctgtcagggaaggttgggtgtggctctccaagaatacattttggtggactcattgaggaagatgatgtgattctccttgctgcagctctgcgaattcagaacatggtcagtagtggaaggagatggcttcgtgaacagcagcacaggcggtggagacttcactgcttgaaacttcagcctctctcccctgtgccaagtgacattgagatttcaagaggacaaactccaaaagctgtggatgtccttgccaaggagattggattgcttgcagatgaaattgaaatctatggcaaaagcaaagccaaagtacgtttgtccgtgctagaaaggttaaaggatcaagcagatggaaaatacgtcttagttgctgggatcacacccacccctcttggagaagggaagagcacagtcaccatcgggcttgtgcaggctctgaccgcacacctgaatgtcaactcctttgcctgcttgaggcagccttcccaaggaccgacgtttggagtgaaaggaggagccgcgggtggtggatatgcccaggtcatccccatggaggagttcaaccttcacttgactggagacatccacgccatcaccgctgccaataacttgctggctgccgccatcgacacgaggattcttcatgaaaacacgcaaacagataaggctctgtataatcggctggttcctttagtgaatggtgtcagagaattttcagaaattcagcttgctcggctaaaaaaactgggaataaataagactgatccgagcacactgacagaagaggaagtgagtaaatttgcccgtctcgacatcgacccatctaccatcacgtggcagagagtattggatacaaatgaccgatttctacgaaaaataaccatcgggcagggaaacacagagaagggccattaccggcaggcgcagtttgacatcgcagtggccagcgagatcatggcggtgctggccctgacggacagcctcgcagacatgaaggcacggctgggaaggatggtggtggccagtgacaaaagcgggcagcctgtgacagcagatgatttgggggtgacaggtgctttgacagttttgatgaaagatgcaataaaaccaaacctgatgcagaccctggaagggacacctgtgttcgtgcatgcgggcccttttgctaacattgctcacggcaactcttcagtgttggctgataaaattgccctgaaactggttggtgaagaaggatttgtagtgaccgaagctggctttggtgctgacatcggaatggagaaattcttcaacatcaagtgccgagcttccggcttggtgcccaacgtggttgtgttagtggcaacggtgcgagctctgaagatgcatggaggcgggccaagtgtaacggctggtgttcctcttaagaaagaatatacagaggagaacatccagctggtggcagacggctgctgtaacctccagaagcaaattcagatcactcagctctttggggttcccgttgtggtggctctgaatgtcttcaagaccgacacccgcgctgagattgacttggtgtgtgagcttgcaaagcgggctggtgcctttgatgcagtcccctgctatcactggtccgttggtggaaaaggatcggtggacttggctcgggctgtgagagaggctgcgagtaaaagaagccgattccagttcctgtatgatgttcaggttccaattgtggacaagataaggaccattgctcaggctgtctatggagccaaagatattgaactctctcctgaggcacaagccaaaatagatcgttacactcaacagggttttggaaatttgcccatctgcatggcaaagacccacctttctctatctcaccaacctgacaaaaaaggtgtgccaagggacttcatcttacctatcagtgacgtccgggccagcataggcgctgggttcatttaccctttggtcggaacgatgagcaccatgccaggactgcccacccggccctgcttttatgacatagatcttgataccgaaacagaacaagttaaaggcttgttctaa

SEQ ID NO: 613 - DNA, 2376 bp, Homo Sapiens
atgccactctatgacaatcagaaggcacgcagcgtgatgaatgagtgtgaacggcatgtcatctttgccaggactgatgcagatgcccctcctccaccagaggactgggaggagcatgtcaacaggactggctggacaatggcccagaacaagctattcaacaagatcctcaaagccctgcagtctgaccggcttgcccgcttggccaacgaaggggcttgtaatgagccagtgctgcgccgtgttgctgtggacaagtgtgcaaggagagtgcggcaggctctggcaagtgtgagctgggataccaagctgatccagtggctgcacaccacccttgtggagaccttgagtctgcccatgctggcagcctacctggatgctttgcagacgctgaaggggaagatcccaaccttgattgaccggatgcttgtgtcatccaacacaaagactggggctgcaggagctgaggccttgtctctcctactgaagaggccctgggaccctgctgtgggtgtgctttctcataacaaaccaagcaaactccctggctctccgctgattctcatcgcctcctctggtccctccagctctgtgtttcccacttcacgccgccaccgcttctggcaatctcagctgtcctgcttgggcaaggtcatccctgtagccacccatctgctgaacaatggcagtggggtaggagttctacagtgtctcgagcatatgattggggcagtgagaagcaaagtgctggagattcacagccatttcccacacaaacccattatcttgattggctggaacacaggagctttggtggcctgtcatgtgtcagtaatggagtatgtcactgcagttgtctgccttgggtttcctctgcttactgtggatggccccagaggggatgtagatgatcccctcttggatatgaagactccagtcctctttgtcattggtcagaattcccttcaatgtcaccctgaagccatggaggacttccgggagaagattcgagctgagaacagcttggtggtggttgggggagctgatgacaatctcagaataagcaaagcaaagaagaaatcagaagggttgactcagagcatggtggacagatgtattcaggatgagattgtggactttctgactggagtgctcactcgtgctgagggtcacatgggctctgaacctcgggatcaggatgctgagaagaagaagaagccccgcgatgtggcccgcagagacttggcctttgaagtccctgagcggggcagtcgacctgcctccccagctgccaagctgcccgcctcaccctcaggctcagaggatctctccagtgtgtccagcagccccacctccagtcccaagaccaaagtgaccacagtgacctctgcccagaagtccagtcagattggaagttctcagctgctgaagagacatgtgcagcggacagaagctgtgctgacccacaaacaagctcaagttcccatttcatcagaaccaccagaggaaggagagaaagaggatcttagggttcagctgaagcgacaccatccctcgagtccccttcctggcagtaagacctccaaacgaccgaagatcaaggtgtcccttatctcccaaggggacacagctggagggccttgtgctccttcccaaggaagtgctccagaagctgcaggtgggaagcccatcaccatgacactggggcaggcttcagcaggggccaaggagctcacaggacttctcaccacagccaagtccagttcttctgaaggtggagtctcagccagcccagtcccttcagtggtctccagcagcactgcacccagtgccttgcacacactgcagagccgcctggtggccacatctcctggcagctccctcccaggggccacatcagccagcagcctcctccaaggcctcagcttcagcttgcaggatatcagcagcaagacctctggccttccagcaaatccctccccaggaccagccccacaggccaccagtgtgaagttgcccacccccatgcagagcctgggtgccatcaccacgggcaccagcaccattgtccgtaccattcctgtggccaccactctctcctccttgggtgccactcctggtgggaagcccacagccatccaccagctgctgaccaatgggggcctcgctaagttggcaagcagcctccctggcctggctcagatctctaaccaagcatcaggcttgaaggtccccaccaccattactctgacacttcgtggccagccgagcaggatcactacactgagccctatgggctcaggagcagccccatccgaggagtcctcttcccaggtgctgccctccagctcacagcgcctgcctccagcaccctga

SEQ ID NO: 614 - DNA, 1167 bp, Homo Sapiens
atggtggaggctgaggaactggcacagctgcggctgctcaatctggagctcctgaggcagctgtgggtggggcaggatgctgtgcggcggtcagtggccagggcagcctcggagtcaagcctggaatccagcagcagctacaactcagagactccatcgaccccagagacgtcctcaacttccttgagcacctcctgcccacggggccggtcctccgtgtggggcccaccagatgcctgtcgaggggacctccgtgatgtggccagatcgggggtggcctctctcccacctgccaaatgccagcaccaggagtccctgggccgaccgagaccccactcagcaccctcgctgggcacctcaagcctgagggacccagagccctcagggaggctgggtgatccaggaccccaggaggcacagaccccgaggtccatcctggctcaacagagcaagctgtccaagcccagggtgaccttctctgaggagtctgcagttcctaagaggagctggcgcctcaggccatacctgggctatgactggattgcagggtctctggacaccagctcttccatcaccagccagcctgaggccttcttctccaagctgcaggagtttcgggaaaccaacaaggaggagtgtatctgcagccatcctgaaccccagttgccaggcctgcgtgagagcagtggcagcggcgtggaggaagaccatgaatgcgtgtactgttaccgtgtcaaccggcgcctgttcccggtgcctgtggatcccggtaccccctgccgcctgtgcaggacaccgcgagaccagcagggccctgggaccctggcgcagccagcgcacgtcagggtgagcatcccgctgtcgatcctggagcccccgcaccggtaccacatccaccggcgaaagagctttgacgcctctgacacactggccctgccccggcactgcctgctgggctgggacatttttcctccgaagtctgagaaaagctcagcccccaggaacctggacctctggtcctctgtctccgctgaggcccagcaccagaagctgtccggcaccagcagcccttttcacccggcctcaccaatgcagatgctgcccccgaccccgacctggtcagtgccccaggtccctcggccccacgtcccacggcagaagccctga

SEQ ID NO: 615 - DNA, 495 bp, Homo Sapiens
atggagagcggcgacgaagcggccatcgagaggcaccgcgtccacttgcgctccgccacattgcgcgacgccgtacccgccacactgcatctgctgccctgcgaggttgcggtggacgggcccgccccggtggggcgcttcttcacgcccgccatccgccagggccccgagggactcgaagtgtcgtttcggggccgctgtctacggggagaggaggtggcggtgccgcctggcctcgtgggatacgtgatggtgacagaagagaagaaggtgtcgatggggaagccagaccccttgcgggattccgggactgacgaccaagaggaggagccgctggagcgggacttcgaccgcttcattggagccactgccaacttcagccgcttcaccctgtggggtctggagaccatccctggcccggatgccaaagtgcgtggggccttaacttggcccagccttgcggcagcgattcacgcacaggtgcccgaggactga

SEQ ID NO: 616 - DNA, 615 bp, Homo Sapiens
atgttcgtcctggtggaaatggtggacaccgtccggatccccccttggcagtttgagaggaagctcaacgactccattgccgaggagctgaacaagaagttggccaacaaggtcgtgtacaacgtgggactctgcatttgtctgtttgatatcaccaaactggaggatgcctatgtattccctggggatggcgcatcacacaccaaagtccattttcgctgcgtggtgtttcatccattcctagatgagattctcattgggaagatcaaaggctgcagcccagaaggagtgcacgtctctctaggcttcttcgatgacattctcatccccccagagtcactgcagcagccagccaagttcgacgaagcggagcaggtgtgggtgtgggagtacgagacggaggaaggagcacacgacctctacatggacaccggcgaggagatccgcttccgggtggtggacgagagctttgttgacacgtcccccacagggcccagctcagcagatgccaccacttccagtgaggagctgccaaagaaggaggctccgtacacgcttgtgggatccatcagtgagccaggcctgggccttctctcctggtggaccagcaactag

SEQ ID NO: 617 - DNA, 1386 bp, Homo Sapiens
atggattcagtggcctttgaggatgtggctgtgaacttcaccctggaggagtgggctttgctggatccttcccagaagaatctctacagggatgtgatgcgggaaaccttcaggaacctggcttctgtaggaaaacaatgggaagaccagaacattgaagacccattcaaaattcccaggagaaatataagtcatattccagagagactctgtgaaagtaaagaaggtggtcaaggtgaagaaaccttcagccagattccagatggtattctgaacaagaaaactcctggagtaaaaccgtgtgaaagcagtgtgtgtggagaagttggcatgggtccttcatcacttaataggcacatcagagatcacactggacgtgaaccaaatgaatatcaggaatatggaaagaagtcatatacacgtaaccagtgtggacgagccttgagttatcatcgctcttttccagtacgtgaaaggactcatcctggaggaaagccctatgattgtaaggaatgtggagaaacctttatttctcttgtaagcattcgaagacacatgttaacgcataggggaggtgtaccttacaaatgtaaggtgtgtgggaaagcctttgattatcccagtttatttcgtatacatgaaagaagtcacactggagagaaaccttatgaatgcaagcaatgtgggaaagccttcagttgttccagttacattagaatacatgaaaggactcacactggagataaaccctatgaatgcaagcagtgtgggaaagctttcagttgttccaagtacattcgaatccatgaacgaactcacacaggagagaaaccctacgaatgtaaacagtgcggtaaagcctttaggtgcgccagttctgttcgaagtcacgagaggactcacaccggagagaaactttttgaatgtaaggaatgcgggaaggctttgacttgtcttgcaagtgttagaagacacatgataaagcacactggcaatggaccttataaatgtaaggtgtgtgggaaagcctttgatttccccagttcatttcgaatccatgaaaggacccacactggagagaaaccctatgattgtaagcaatgtgggaaagccttcagttgttccagttcgtttcgaaaacatgaaagaattcacactggagagaaaccctataaatgtacaaaatgtgggaaagccttcagtcgttccagttacttccgaatccatgaaagaactcacactggagagaaaccctatgaatgtaagcaatgtgggaaagccttcagtcgatccacttactttcgagtacatgaaaaaattcatactggagagaaaccctatgagaaccctaaccctaacgcttcagttgtcccagttctttcatga

SEQ ID NO: 618 - DNA, 2748 bp, Homo Sapiens
atggcggagactctgtcaggcctaggtgattctggagcggcgggcgcggcggctctgagctccgcctcgtcagagaccgggacgcggcgcctcagcgacctgcgagtgatcgatctgcgggcggagctgaggaaacggaatgtggactcgagcggcaacaagagcgttttgatggagcggctgaagaaggcaattgaagatgaaggtggtaatcctgacgaaattgaaattacctccgagggaaacaagaaaacatcaaagaggtctagcaaagggcgcaaaccagaagaagagggtgtggaagataacgggctggaggaaaactctggggatggacaggaggatgttgagaccagtctggagaacttgcaggacatcgacatcatggatatcagtgtgttggatgaagcagaaattgataatggaagcgttgcagattgtgtcgaagacgatgatgctgataacctccaggagtccctgtcggatagtagagagctagtcgagggggaaatgaaagagcttccggagcagcttcaggaacatgctatagaggacaaagaaactataaacaatttagatacttcatcatctgacttcactatattacaggaaattgaagagccatccctggagccagaaaatgagaaaatactcgacattttgggggaaacttgtaaatctgagccagtaaaagaagaaagttccgagctggagcagccatttgcacaggacacaagtagcgtggggccagacagaaagcttgcggaggaagaggacctatttgacagcgcccatccggaagagggtgatttagatttggccagcgagtcaacagcacacgctcagtcgagcaaggcagacagcctgttagcggtagtgaaaagggagcccgcggagcagccaggcgatggcgagaggacggactgtgagcctgtagggctagagccggcagttgagcagagtagtgcggcctccgagctcgcggaggcctctagcgaggagctcgcagaagcacccacggaagccccaagcccagaagccagagatagcaaagaagacgggaggaagtttgattttgacgcttgtaatgaagtccctccggctcctaaagagtcctcaaccagtgagggcgctgatcagaaaatgagttctcccgaagatgactcggatacaaaaaggctttccaaagaggaaaagggtcgcagcagttgtggtagaaatttctgggttagtggactctcttctacaaccagagctacagatttgaagaatcttttcagcaaatatgggaaggtggtgggcgccaaggttgtgacaaatgcccggagtcctggagctcgctgttacggttttgtcacgatgtccacagcagaagaggccacaaaatgcattaaccacctgcacaagacggagctccacggaaagatgatctccgtggagaaagccaaaaatgaacctgtgggaaagaaaacctctgacaaaagagacagtgacgggaaaaaggagaagtcgagcaacagtgacagatctacaaaccttaagagggatgataaatgtgacagaaaagatgatgctaagaagggtgacgacggaagtggagaaaagagtaaggaccaagatgatcagaaacctggcccctcagagcgatctcgagccacaaagtcaggaagtcgagggaccgaacggactgtagtaatggataaatccaaaggggtgcctgtgattagtgtaaaaacgtccgggtccaaagagagagcttccaaaagccaggatcgcaaatcagccagcagagagaagcggtccgtcgtgtcctttgataaggtcaaggagcctcggaagtcaagagactcagagtcccatagcagggtgcgtgaacgcagtgaacgcgaacaacgcatgcaggcgcagtgggagcgcgaggagcgtgagcggctggagattgcccgagagaggctggccttccagcgccagcggctggagcgggagcgcatggagcgggaacggctggagcgcgaacgcatgcacgtggagcacgagcgcaggcgcgagcaggagcgcatccaccgtgagcgcgaggagctgaggcgccagcaggaactgcgctatgagcaggagcggcggcccgcggtgcggcggccctacgacctggaccggcgagatgatgcctattggccggaagccaagcgggccgccctggatgagcgctaccattctgactttaaccgccaggaccgcttccacgactttgaccacagggaccgcggccgctaccccgaccactcggtggacaggagagaaggttcaaggtcaatgatgggagaacgagaaggacagcattacccagaacgccatggaggaccagagcgccacggccgggactcccgcgatggctgggggggctatggctctgacaagaggatgagcgagggccgggggctgcctcctccccccagacgtgactggggggaccatggccgaagagaggatgaccggtcatggcagggcacggccgacgggggcatgatggacagggatcacaagaggtggcaaggtggcgagagaagcatgtccggtcactccgggcctggccacatgatgaaccgaggaggaatgtcagggcgcggcagctttgccccaggcggggcctcccggggccaccccatcccacacggtggcatgcagggcgggtttggaggccagagccgggggagcaggcccagcgatgcccgcttcactcgccgctactga

SEQ ID NO: 619 - DNA, 2010 bp, Homo Sapiens
atgaagatattcgtgggcaacgtcgacggggcggatacgactccggaggagctggcagccctctttgcgccctacggcacggtcatgagctgcgccgtcatgaaacagttcgccttcgtgcacatgcgcgagaacgcgggcgcgctgcgcgccatcgaagccctgcacggccacgagctgcggccggggcgcgcgctcgtggtggagatgtcgcgcccaaggcctcttaatacttggaagattttcgtgggcaatgtgtcggctgcatgcacgagccaggaactgcgcagcctcttcgagcgccgcggacgcgtcatcgagtgtgacgtggtgaaagactacgcgtttgttcacatggagaaggaagcagatgccaaagccgcaatcgcgcagctcaacggcaaagaagtgaagggcaagcgcatcaacgtggaactctccaccaagggtcagaagaaggggcctggcctggctgtccagtctggggacaagaccaagaaaccaggggctggggatacggccttccctggaactggtggcttctctgccaccttcgactaccagcaggcttttggcaacagcactggtggctttgatgggcaagcccgtcagcccacaccacccttctttggtcgcgaccgcagccctctgcgccgttcacctccccgagcctcttatgtggctcctctgacggcccagccagctacctaccgggcccagccgtccgtgtcactgggagctgcctacagggcccagccttctgcctctttgggtgttggctatcggactcagcccatgacagcccaggcagcctcttaccgcgctcagccctctgtctcccttggggcaccatacaggggccagctggctagtcctagctcccagtctgctgcagcttcttcactcggcccatatggtggagcccagccctcagcctcggccctttcctcctatgggggtcaggcagctgcagcttcttcgctcaactcctatggggctcagggttcctcccttgcctcctatggtaaccagccatcctcttacggcgcccaggctgcctcttcctatggggttcgtgcagctgcttcttcctacaacacccagggagcagcttcctccttaggctcctacggggctcaggcagcctcctatggggcccagtctgcagcctcctcactagcttatggagcccaggcagcttcatataatgcccagccctcggcctcttacaatgcccagtctgccccatatgctgcacagcaggctgcttcctactcttcccaacctgctgcctatgtggcacagccagccacagctgctgcctatgccagccagccagcagcctacgccgcacaagccactaccccaatggctggctcctatggggcccagccggttgtgcagacccagctgaatagttacggggcccaagcatcaatgggcctttcaggctcctatggggctcagtcggctgctgcggccactggctcctatggtgccgcagcagcctacggggcccaaccttctgccaccctggcagctccttaccgcactcagtcatcagcctcattggctgcttcctatgctgcccagcagcatccccaggctgctgcctcctaccgcggccagccaggcaatgcctacgatggggcaggtcagccgtctgcagcctacctgtccatgtcccagggggccgttgccaacgccaacagcaccccgccgccctatgagcgtacccgcctctccccaccccgggccagctacgacgatccctacaaaaaggctgtcgccatgtcgaaaaggtatggttccgaccggcgtttagccgagctctctgattaccgccgtttatcagagtcgcagctttcgttccgccgctcgccgacaaagtcctcgctggattaccgtcgcctgcccgatgcccattccgattacgcacgctattcgggctcctataatgattacctgcgggcggctcagatgcactctggctaccagcgccgcatgtag

SEQ ID NO: 620 - DNA, 1044 bp, Homo Sapiens
atgaaaatggaggaaatgtctttgtctggcctggataacagcaaactagaggccatcgctcaggagatatacgcggacctggtcgaggattcttgtttgggattctgctttgaggtacaccgggctgtcaagtgtggctacttcttcttggacgacacggaccctgatagcatgaaggattttgagatcgtggaccagccgggcttggacatctttggacaggttttcaaccagtggaagagcaaggagtgtgtttgccccaattgcagtcgcagcattgccgcctcccgctttgctccccatctggagaagtgcctgggaatgggtcggaacagcagccgaatcgccaaccgccggattgccaatagcaacaatatgaataagtctgagagtgaccaagaagataatgatgacatcaatgacaacgactggtcctatggctcggagaagaaagccaagaagagaaagtcagacaagaaccccaattcccctcgaagatccaagtcattaaaacacaaaaatggggaacttagcaattcggatccttttaagtataacaattcaactgggatcagctatgagaccctggggccggaggagcttcgcagcctgctaaccacgcaatgtggggtgatttctgaacacaccaagaagatgtgcacaaggtccctgcgctgcccacagcacacagatgagcagaggcgaaccgtacggatttattttctcgggccctcggctgtccttccagaggtcgagagctccctggataatgacagctttgacatgactgacagccaggccctgatcagccggcttcagtgggacggctcctctgacctctcaccctctgattcaggctcctccaagacgagtgaaaatcagggatggggtctaggtaccaacagctctgagtcacggaaaaccaagaaaaagaaatcccatctgagcctggtagggactgcctccggcctaggttccaacaagaagaagaagccaaagccaccggcacccccgacgcccagcatctatgatgacatcaactga

SEQ ID NO: 621 - DNA, 774 bp, Homo Sapiens
atggagtttccggacctcggcgctcactgttcggagccgagctgtcagcgcttggattttctgccgcttaagtgtgatgcctgctcaggcatcttctgcgcagaccatgtggcctacgcccagcatcactgtggatctgcttaccaaaaggatatccaggtacctgtgtgccctctctgtaatgtgcctgtgcctgtggccagaggggagccccctgaccgtgctgtgggagagcacattgacagagactgtcgctctgatccagcacagcaaaaacgtaagatcttcaccaataagtgtgaacgcgctggctgccggcagcgagaaatgatgaaactgacctgtgaacgctgtagccgaaacttctgcatcaagcaccggcatccactggaccatgattgctctggggaggggcacccaaccagccgggcaggacttgctgccatctccagagcacaagctgtggcttctacaagcactgtccccagcccaagtcaaaccatgccttcctgtacctctcccagcagagccacaacccgatctccgtcctggacagcccctccagtgattgctttgcagaatggcctgagtgaggatgaagctctgcagcgggccctggaaatgtccctggcagaaaccaaaccccaggttccaagttgtcaggaggaagaagacctagctttagcacaagcactgtcagccagtgaggcagaataccagcggcagcaggcccagagccgcagctcgaagccgtccaactgcagcctgtgctag

SEQ ID NO: 622 - DNA, 11994 bp, Homo Sapiens
atgctggagtcatatgtaactccaattttaatgagctatgtgaatcgctacatcaagaacttaaagccgtcggatctacagctttcactatggggtggagacgtggtactcagcaagctcgagttaaagttggatgtgctggaacaggaactgaaattaccattcacttttttaagtggacatattcatgaattgaggattcatgtaccatggacaaaactgggttcagaaccagtggtaattaccatcaatactatggaatgcattttgaaacttaaggatgggatacaggatgaccatgaaagctgtggttctaattctaccaaccgtagtactgctgagagcacaaaatcatcaatcaaaccgcggagaatgcagcaggctgctcctacagatcctgacttaccaccaggttatgtgcagagtctgattagacgagttgtaaataatgtaaacattgtgataaataatctcatactaaaatatgttgaagatgatatcgtcctttccgtcaatatcacttctgcagaatgttatacagtaggtgaattatgggatcgtgcattcatggatatttctgcaactgatttggtgctgagaaaggttatcaatttttctgactgtacagtttgtcttgataaacggaatgccagtggtaaaatagaattttaccaggatcctttattatacaaatgttccttcagaactcgtcttcattttacatatgaaaacctaaattccaagatgccatctgttattaaaattcatactttagtggaaagtttgaaactttctatcacagatcaacaactgcctatgtttattcgtataatgcaacttggaattgctctttactatggagaaataggcaattttaaagaaggcgaaatagaggaccttacttgtcataataaagatatgctaggaaacattacaggttctgaagatgaaacaagaatagatatgcaatatcctgctcagcataaaggtcaagagttatattcacagcaagatgaggagcagccacagggatgggtgtcatgggcctggtcctttgtgcctgcaattgtgagttatgacgatggcgaggaagactttgttgggaacgatcctgcatcaaccatgcatcaacaaaaagcacagactttgaaggatcctattgtttctataggattttattgcacaaaggcaacggtgactttcaaactcacagaaatgcaagttgagagtagttattacagtccacagaaagtaaaatctaaagaagtattgtgttgggaacaagaaggaactacagttgaggcccttatgatgggagaacctttctttgattgccagattgggtttgttggttgcagagccatgtgccttaaaggaattatgggtgttaaagattttgaagagaatatgaatagaagtgaaactgaagcctgtttcttcatttgtggtgacaatttgagtacgaaaggtttcacataccttacaaattcattgtttgattaccgaagcccagaaaataatggtactcgcgcagaatttatcttggattcaactcatcataaggagacatacactgagatagctggaatgcaacggtttggggctttttatatggattacctgtatacaatggagaacactagtggcaaaggttccacaaatcaacaagacttttcttcagggaaaagtgaagatttgggaacagttcaggagaagtccaccaaaagccttgttataggtcctcttgattttcgtttggatagcagtgcggtgcataggattttgaaaatgattgtgtgtgccttggaacatgaatatgaaccatatagcaggctaaaatcagatattaaggatgaaaatgaaacaatactgaatcctgaagaggtggctcttctggaggaatatattcctactcgacatacaagtgttactctcctcaaatgtacctgcacaatttccatggctgaattcaacttgctggaccatttactacctgtcattatgggagaaaagaactcaagtaacttcatgaatactacaaacttccagtctcttcggcctttgccatccattcgaatattggtggataaaattaatctggaacattcagtgccaatgtatgctgaacagttggtgcatgtggtcagcagccttactcaaccttctgataacctgcttcattattgttatgtacactgctatcttaagatatttggtttccaggcaggactgacgtctttggattgcagtggatcttactgcttacctgtaccagttattccctctttcagcactgctctttatgggaaacttctgaaactccccacatgctggaccaaaagatctcagattgctataactgaaggtatatttgaacttccaaatctcacaattcaagctacaagagcacagacacttctcttgcaagcaatatatcaaagttggtctcatcttggaaatgtcagctcttccgcagtgattgaagctttgataaatgaaatcttcctaagtataggtgtgaaatctaagaatcccctgccaactcttgagggctcaatccagaatgttgaattgaagtactgcagcacatcattggtcaaatgtgcctctgggaccatgggatcaataaaaatttgtgccaaagccccagttgatagtggaaaagagaagttgattcccttgcttcagggtccttctgacactaaagaccttcatagcaccaagtggctcaatgagagtagaaagccagagtctctcttagctccagatttgatggccttcacaatccaagttccacaatatattgactactgccacaattccggtgctgtacttctttgcagtatacaaggactagcagttaatattgacccaatcttatatacgtggctcatctatcagcctcagaaacgaacaagtagacatatgcaacagcagcctgtggtagctgttcctcttgttatgccagtttgtagaaggaaagaggatgaggtgtctattggaagtgcccccttggcaaagcagcaatcatatcaggcctctgaatatgccagcagccctgtaaaaacaaaaacggtaacagaatcccgcccattgtcagttcctgttaaagccatgttgaatatatctgaaagctgtagaagtcctgaagaaagaatgaaggaatttattggaattgtttggaatgcagtgaagcatctcacactacagcttgaagtacaatcttgttgtgtgtttattccaaatgatagcctgccttccccaagtacaattgtatctggtgacattcctggaacagtaagaagttggtaccatggacaaaccagcatgccgggaacacttgtcctctgtttgcctcaaataaagattattagtgctgggcacaagtatatggaacctctgcaggagattccatttgttatcccacgacccatccttgaagaaggtgatgcttttccttggacgatcagcttgcataatttcagcatatatacccttcttggaaaacaagtgacactttgcctagtggaacctatgggttgcacctccactctagctgtcacgtctcaaaaactgcttgctacgggacctgatacacgacattcatttgttgtctgtctccatgttgacctagagtcactagagataaaatgctctaatccccaggtccagctcttctatgaactaactgatatcatgaataaggtctggaacaagattcagaagagaggcaatctcaacctatctccaacctctccagagaccatggcagggcctgttcctacttctccagttagaagcagtataggcacagctcctccagataccagcacatgcagcccatctgctgacattgggactactactgagggagattctatacaagcaggtgaggaatcaccattctcagattctgtgaccttggaacaaactacaagtaatattggaggaaccagtggacgtgttagtttatggatgcagtgggtgcttcccaaaattactataaagctctttgctccagatcctgaaaataaaggcacagaggtttgtatggtcagtgaactagaagatctcagtgcttccatagatgtccaggatgtatataccaaagtgaaatgtaaaatagagagtttcaatattgatcactatagaagcaggccaggggaaggttggcagtcaggacattttgaaggagtatttctacaatgcaaagaaaaatctgtgacaactacaaaacttctagatggcactcatcagcagcatggattcctctctctgacatacacaaaagctgtaacaaaaaatgtccgccacaagttaacatcaagaaatgagcgaagaagttttcataagttatctgaaggcctaatggatggttctcctcattttcttcatgaaattcttctttcagcacaagcttttgatattgttctttattttcctttacttaatgccattgcaagtatatttcaagcaaaactaccaaagacccaaaaagagaaaagaaaatctcctggtcagcccatgaggacccatacactgacatcccgcaatttacctttgatttatgtcaacacaagtgtaatcagaatttttattccaaaaacagaagaaatgcagccaactgttgaagctaatcaggcagcaaaagaagacactgtggttttgaagattggctctgttgccatggctccccaggctgacaatccccttggcagatctgtccttaggaaagatatttaccagagagccttgaacttaggaattcttcgagatcctggatcagaaatcgaagacagacaataccaaatagatctgcagtccatcaatattggtactgcacagtggcatcaactaaaaccagagaaggaaagtgtctcaggaggggtggtaacagagactgaaaggaattctcaaaatccagcccttgagtggaatatggccagcagcatacggcggcatcaagaaaggagagcaattttgacccccgttttgacagatttttctgtccgaataactggagcacctgctgtcattttcaccaaagtagtttctccagaaaatttgcatactgaggagattttagtgtgtggccattccttagaagtgaatataaccacaaacctggacttcttcctaagtgtggctcaagttcaactcttacatcagttaatagtagcaaatatgactggactggaaccatcaaacaaggctgcagagatctctaaacaagaacagaaaaaagtggatatatttgatggaggcatggctgaaacctcatctcgctacagtggtgctcaggatagtggaattggcagtgacagtgttaaaatcagaatagtgcaaatagagcagcacagtggtgccagtcagcatcgcattgcccgtccctcacgccagtcatcaattgtaaaaaatctaaattttattccctttgacatatttattactgcaagtagaatctcactaatgacctattcctgtatggccttatccaaatcgaaatcacaagaacagaagaataatgaaaaaacagacaagagttcattaaatctcccagaagttgattcagatgttgctaagcccaaccaggcatgtatttccacggtgacagcagaagatctcttaaggagcagcatttcttttccttcagggaaaaaaataggggtcctctctcttgaaagtcttcatgcatccacaaggtcatctgctagacaagcacttggtataactattgttcggcagcctggtcgaagaggaactggtgacttacagctagagccttttctgtactttattgtgtcccagccttccttgcttctgagttgtcaccacagaaagcagcgagtggaagtatccatttttgatgctgtgcttaaaggggtggcctctgattacaaatgtatagatcctgggaagactctgcctgaagcccttgattattgcactgtttggctacagacagtgcctggagaaatagacagcaaaagtggtattccaccttcctttataacactacagattaaagactttctgaatggaccagcggatgtcaatttggatatatcaaagcctttgaaagcaaacctgagtttcaccaaactggatcagataaacctttttttaaagaagataaaaaatgcacacagtttggcacatagtgaagagacttcagccatgtccaacaccatggtgaataaggatgatcttccagtctccaaatattaccgtggaaagttgtctaaacccaaaattcatggtgatggagtgcaaaagatttcagctcaagaaaacatgtggagagctgtttcctgctttcaaaaaatttctgttcaaactactcagattgtgatctccatggaaactgtaccccataccagcaaaccatgcctgttagcatctctctcaaacctcaatggaagccttagtgtcaaggcaacacaaaaagtacctggcataattcttgggtcatcatttctactcagtataaacgattttctccttaaaacaagtctcaaagaaagaagccgcattctgataggaccatgttgtgctactgccaatctggaagctaagtggtgtaaacacagcgggaatccaggcccagaacaatccataccaaaaatatccattgacttaagaggaggtctactacaggtcttctggggtcaagaacatttgaattgtttagttcttctacatgaattactcaatggataccttaatgaggagggaaattttgaagtacaagtttctgaaccagtgcctcaaatgtcatctcctgtggaaaagaatcagacatttaaaagtgaacaaagttcagatgacctacggacaggtctatttcagtatgtacaggatgctgaatctttgaaattgcctggggtctatgaagtcttattttataatgaaactgaagattgcccagggatgatgttatggagatatccagaacctagagtactcacccttgtacgaataactcctgtaccttttaacaccacagaggatccagatattagcacagcagaccttggtgatgtgctacaggttccttgtagcttggaatactgggatgaactccagaaggtttttgttgcatttagagaatttaatctgtctgaaagcaaagtttgtgaactgcagttgccggatatcaatctcgtgaatgaccagaagaaattagtatcttcagatctttggagaattgtcttgaacagcagtcaaaatggagctgatgaccaaagctctgcaagtgagtctggttctcaaagcacttgtgatccacttgtgactccaacagccctggctgcctgtaccagagttgactcctgctttaccccatggtttgtcccatccctttgcgtttctttccagtttgctcacctggaattccatctttgtcatcaccttgaccaactaggcacagctgcaccacagtacctacagccatttgtttccgacagaaatatgccatctgaactagaatacatgattgtttccttcagagaaccacacatgtatcttcgacagtggaataatggttctgtctgtcaggagatccagttcttagctcaagcagactgtaaacttctagagtgcagaaatgtcactatgcaaagtgtggtgaaacccttcagcatcttcgggcagatggcagtttccagcgatgtagtggaaaagctgcttgactgcaccgtgatagttgattctgtatttgtaaaccttggacagcatgtagtccattcactaaacactgcaatacaagcttggcaacagaacaaatgccctgaggtagaggagttggtcttcagccattttgtgatctgtaatgacacacaggagacactgcggtttggccaggtggatactgatgaaaatattctgctggcgagtctccacagtcaccagtacagctggcgctctcacaaatccccacagctgttacacatctgtattgaaggttggggcaactggcgttggtcagagcctttcagtgtggaccatgccgggacttttattagaacaattcagtacaggggtcgaactgcttctctcatcatcaaggttcagcaactcaatggagtacaaaaacagattatcatctgtggaagacagatcatctgtagttacttgtctcaaagcatagaactaaaagtcgttcagcattacattggtcaagatggacaagctgtagttcgggaacattttgactgcctcacagccaaacagaaattgccttcgtacatactagaaaacaatgaactgacggagctgtgtgtgaaggccaaaggagatgaagactggtcaagagatgtgtgcctggaatccaaagcccctgagtacagcattgtcattcaggtgccatcttcaaacagttccattatttatgtctggtgcacagttttgactttagaacccaactctcaagtgcaacaacgaatgattgtgttcagccctctttttatcatgaggagtcatcttccagaccccattatcatacatttggagaaaaggagtctgggattgagtgaaacacaaattattccaggaaaagggcaggaaaaaccactgcaaaacatagaacctgaccttgtacatcacctgacattccaagcaagagaagaatatgatccttcagattgtgcagttcccatctcaacatccctcattaagcaaatagccactaaggtacaccctggaggcacagttaatcagatccttgacgaattctatgggccagaaaagtcgcttcaacccatatggccctataataagaaggattctgacaggaatgaacagctaagtcagtgggatagcccaatgcgagtgaagctgtcaatctggaagccatatgttagaactttgttgatagaacttctgccctgggccctgcttatcaatgaatccaaatgggacctctggctatttgaaggagagaaaattgttctacaggttcctgctggcaaaattattattcctcctaattttcaggaagcttttcaaattggaatatactgggcaaatacaaacactgtgcacaagtcagtagcaattaaactggtccataacctgacatctccaaagtggaaagatggaggtaatggtgaagttgtgacactggatgaagaagcgtttgttgatactgaaataagacttggtgcttttccaggacatcagaagttatgtcagttctgcatttcctccatggtacagcaaggtatacaaattattcagattgaagacaagactacaataatcaataatacaccatatcaaatattttataaaccacagctatctgtctgcaatccccattctggaaaggagtattttcgtgttccagacagtgctacttttagcatttgcccaggtggagagcagcctgctatgaaatccagctcccttccttgctgggacttgatgcctgacatcagtcagtcagtactggatgcatccctgcttcagaaacagatcatgctgggcttttctcctgccccaggtgctgacagctcacagtgctggagcctgccagctatagttagaccagagtttcccagacagagtgtggcagtacccctcgggaatttccgggaaaatggattctgtaccagggctatagtgctgacatatcaagaacacctcggagtgacttatttaaccctctcagaagaccctagtcctcgagtaattatccacaatagatgtccagtaaaaatgcttataaaggaaaacattaaagatattccaaagtttgaggtttattgcaaaaaaattccctccgagtgctcaattcatcatgagctgtatcatcagatttccagttatccggactgcaagaccaaagacttacttccaagcctacttttgagagttgaacctctagatgaagtaacaactgagtggagtgatgccattgacatcaacagtcagggaacacaggttgtgttcctgactggctttggctatgtgtatgtggatgttgtacatcagtgtggcacagtcttcatcactgtggccccagaaggaaaagcaggacctattttaaccaataccaacagagcgccagagaagattgttacatttaaaatgttcatcactcagttaagcctggcagtgtttgatgacctcacccaccacaaagcatcagctgagcttctgagactcacactggacaacatttttctctgtgtggccccgggagctggtcccctccctggggaagagcctgtggctgcgttgtttgaactttactgtgtggagatctgctgtggggacctgcagctagacaaccagctttataacaagtccaatttccactttgctgtcttagtctgccagggagaaaaagcagaacccattcagtgttccaaaatgcagagtctcctcatatccaacaaagagttggaagaatacaaggaaaaatgttttatcaaactttgcatcaccttaaatgaaggcaagagcatcctctgtgatattaatgagttcagctttgaattaaaacctgctcggttatacgtggaagacacatttgtatactacatcaagactttgtttgacacctaccttcctaacagcaggttggctggtcactccacacacctctccgggggtaaacaggtgttgcccatgcaggtcacacagcacgccagggccttggtgaatcctgtgaagttacggaaactggtgatccagccagtaaatttgctcgtcagcatccacgcttccctcaagctgtacatagcctcagaccacactcctctctccttctcggtgtttgaaagaggacccatcttcaccactgcgaggcagcttgtgcacgccctggcaatgcactatgccgctggggccctttttagagcaggctgggtagttgggtctctggatattcttggcagccctgcaagcctggtgagaagcatcgggaacggggtcgccgacttcttcaggcttccgtatgaggggctgacccggggccctggagccttcgtgagtggcgtctccagagggaccacatcgtttgtaaagcacatctccaaaggtaccctcacatccatcaccaacctcgccacaagcctggcccggaacatggaccggctctcactggatgaggagcactacaaccggcaggaggagtggcggcggcagctccccgagagcctgggcgaggggcttcgacagggcctgtcccggctgggcatcagcctgcttggtgcaattgctggtatagttgatcagccgatgcagaacttccagaaaacatctgaggcacaggcttcagcaggacacaaggccaagggtgtcatctcgggtgtggggaaaggaatcatgggggtgttcacaaagcccatcggaggagctgctgagctggtgtcacagactggctatggtattttacatggagctggactttctcagcttcccaaacagcgccatcagccaagtgatctacatgctgaccaggctccaaacagccatgtcaaatatgtctggaaaatgcttcagtctctgggcagaccagaagtccacatggccctggacgtggttctggtgaggggctcaggccaggagcatgaagggtgcttgctgctgacatcagaagtgctcttcgtggtgagtgtcagtgaggacacacagcagcaggccttccccgtcacagaaatcgactgtgcacaggacagcaagcagaacaacttactcacagtgcagctcaagcagccaagagtggcctgtgatgtggaggtagatggagtccgagagagactgtcagagcaacagtacaacagactggtggactacatcacaaagacatcttgtcacctggcccccagctgttcttccatgcaaataccatgccctgtggtggctgcagaacctcccccctccactgttaaaacataccattacctggttgatccacattttgctcaggtcttccttagtaaatttaccatggtgaaaaataaagccctgaggaaagggtttccttga

SEQ ID NO: 623 - DNA, 618 bp, Homo Sapiens
atgggcaccgcaggagccatgcagctgtgctgggtgatcctgggcttcctcctgttccgaggccacaactcccagcccacaatgacccagacctctagctctcagggaggccttggcggtctaagtctgaccacagagccagtttcttccaacccaggatacatcccttcctcagaggctaacaggccaagccatctgtccagcactggtaccccaggcgcaggtgtccccagcagtggaagagacggaggcacaagcagagacacatttcaaactgttccccccaattcaaccaccatgagcctgagcatgagggaagatgcgaccatcctgcccagccccacgtcagagactgtgctcactgtggctgcatttggtgttatcagcttcattgtcatcctggtggttgtggtgatcatcctagttggtgtggtcagcctgaggttcaagtgtcggaagagcaaggagtctgaagatccccagaaacctgggagttcagggctgtctgaaagctgctccacagccaatggagagaaagacagcatcacccttatctccatgaagaacatcaacatgaataatggcaaacaaagtctctcagcagagaaggttctttaa

SEQ ID NO: 624 - DNA, 1389 bp, Homo Sapiens
atggcgtccccggcgctggcggcggcgctggcggtggcggcagcggcgggccccaatgcgagcggcgcgggcgagaggggcagcggcggggttgccaatgcctcgggggcttcctgggggccgccgcgcggccagtactcggcgggcgcggtggcagggctggctgccgtggtgggcttcctcatcgtcttcaccgtggtgggcaacgtgctggtggtgatcgccgtgctgaccagccgggcgctgcgcgcgccacagaacctcttcctggtgtcgctggcctcggccgacatcctggtggccacgctggtcatgcccttctcgttggccaacgagctcatggcctactggtacttcgggcaggtgtggtgcggcgtgtacctggcgctcgatgtgctgttttgcacctcgtcgatcgtgcatctgtgtgccatcagcctggaccgctactggtcggtgacgcaggccgtcgagtacaacctgaagcgcacaccacgccgcgtcaaggccaccatcgtggccgtgtggctcatctcggccgtcatctccttcccgccgctggtctcgctctaccgccagcccgacggcgccgcctacccgcagtgcggcctcaacgacgagacctggtacatcctgtcctcctgcatcggctccttcttcgcgccctgcctcatcatgggcctggtctacgcgcgcatctaccgagtggccaagctgcgcacgcgcacgctcagcgagaagcgcgcccccgtgggccccgacggtgcgtccccgactaccgaaaacgggctgggcgcggcggcaggcgcaggcgagaacgggcactgcgcgcccccgcccgccgacgtggagccggacgagagcagcgcagcggccgagaggcggcggcgccggggcgcgttgcggcggggcgggcggcggcgagcgggcgcggaggggggcgcgggcggtgcggacgggcagggggcggggccgggggcggctgagtcgggggcgctgaccgcctccaggtccccggggcccggtggccgcctgtcgcgcgccagctcgcgctccgtcgagttcttcctgtcgcgccggcgccgggcgcgcagcagcgtgtgccgccgcaaggtggcccaggcgcgcgagaagcgcttcacctttgtgctggctgtggtcatgggcgtgttcgtgctctgctggttccccttcttcttcagctacagcctgtacggcatctgccgcgaggcctgccaggtgcccggcccgctcttcaagttcttcttctggatcggctactgcaacagctcgctcaacccggtcatctacacggtcttcaaccaggatttccggcgatcctttaagcacatcctcttccgacggaggagaaggggcttcaggcagtga

SEQ ID NO: 625 - DNA, 987 bp, Homo Sapiens
atgctgccgagagtgggctgccccgcgctgccgctgccgccgccgccgctgctgccgctgctgccgctgctgctgctgctactgggcgcgagtggcggcggcggcggggcgcgcgcggaggtgctgttccgctgcccgccctgcacacccgagcgcctggccgcctgcgggcccccgccggttgcgccgcccgccgcggtggccgcagtggccggaggcgcccgcatgccatgcgcggagctcgtccgggagccgggctgcggctgctgctcggtgtgcgcccggctggagggcgaggcgtgcggcgtctacaccccgcgctgcggccaggggctgcgctgctatccccacccgggctccgagctgcccctgcaggcgctggtcatgggcgagggcacttgtgagaagcgccgggacgccgagtatggcgccagcccggagcaggttgcagacaatggcgatgaccactcagaaggaggcctggtggagaaccacgtggacagcaccatgaacatgttgggcgggggaggcagtgctggccggaagcccctcaagtcgggtatgaaggagctggccgtgttccgggagaaggtcactgagcagcaccggcagatgggcaagggtggcaagcatcaccttggcctggaggagcccaagaagctgcgaccaccccctgccaggactccctgccaacaggaactggaccaggtcctggagcggatctccaccatgcgccttccggatgagcggggccctctggagcacctctactccctgcacatccccaactgtgacaagcatggcctgtacaacctcaaacagtgcaagatgtctctgaacgggcagcgtggggagtgctggtgtgtgaaccccaacaccgggaagctgatccagggagcccccaccatccggggggaccccgagtgtcatctcttctacaatgagcagcaggaggctcgcggggtgcacacccagcggatgcagtag

SEQ ID NO: 626 - DNA, 204 bp, Homo Sapiens
atgggtcaccagcagctgtactggagccacccgcgaaaattcggccagggttctcgctcttgtcgtgtctgttcaaaccggcacggtctgatccggaaatatggcctcaatatgtgccgccagtgtttccgtcagtacgcgaaggatatcggtttcattaagaaagacctgagctgtcttccttggcactgcctatggaggtga

SEQ ID NO: 627 - DNA, 2379 bp, Homo Sapiens
atgcaaggggaggacgccagatacctcaaaaggaaagttaaaggagggaatatagatgtacatccatcagaaaaagcactcattgttcactatgaagtggaagctaccattcttggagaaatgggggaccccatgttgggagaacgaaaagaatgtcaaaaaatcattcgacttaagagtctcaatgccaacacagatataacttccctggcaaggaaggtggttgaagaatgtaaactcattcatccttcaaaactaaatgaggtagaacagctgttgtactatctacagaaccgccgtgattcattgtcaggaaaagagaaaaaagaaaaatcaagcaagcctaaagatccacctccttttgaaggaatggagattgatgaagttgctaacattaatgacatggatgaatatattgagttattatatgaagatattcctgacaaagttcggggttctgctttgatcctgcagcttgctcgaaatcctgataacttggaagaactactattgaatgaaactgcccttggtgcattagcaagggtcctgagagaagactggaagcaaagtgtcgagttagctacaaacataatttacatctttttttgtttctccagcttttctcaatttcatggacttattactcactataaaattggagctctgtgtatgaatattattgatcatgagttaaaaagacatgagctttggcaagaagaactctcaaagaagaagaaagctgttgatgaagaccctgaaaaccaaaccttgagaaaggattatgaaaaaacctttaaaaagtaccaggggcttgtggtaaaacaggaacagctattacgagttgctctttatttgcttctgaatcttgctgaggatactcgtaccgaactgaaaatgaggaacaagaacatagttcacatgttggtgaaagcccttgatcgggacaattttgagctgctaattttagttgtgtcattcttgaagaaactcagcatttttatggagaataaaaatgatatggtggaaatggatattgttgaaaaactggtgaaaatgataccttgtgagcatgaagacctgctgaatatcaccctccgacttttactaaacctatcctttgacacaggactgaggaataagatggtacaagttggactgcttcccaagctcactgcactcctaggcaatgacaactacaaacaaatagcaatgtgtgttctttaccacataagcatggatgaccgctttaaatcaatgtttgcatacactgactgtataccacagttaatgaagatgctgtttgaatgttcagatgaacgaattgacttggaactcatttctttctgcattaatcttgctgctaacaaaagaaatgtacagcttatctgtgaaggaaatgggctgaagatgctcatgaagagggctctgaagtttaaggatccattgctgatgaaaatgattagaaacatttctcagcatgatggaccaactaaaaatctgtttattgattatgttggggaccttgcagcccagatctctaatgatgaagaagaggagtttgtgattgaatgtttgggaactcttgcaaacttgaccattccagacttagactgggaattggttcttaaagaatataagttggttccatacctcaaggataaactaaaaccaggtgctgcagaagatgatcttgttttagaagtggttataatgattggaactgtatccatggatgactcttgtgctgcattgctagccaaatctggcataatccctgcactcattgaattgctaaatgctcaacaagaagatgatgaatttgtgtgtcagataatttatgtcttctaccagatggttttccaccaagccacaagagacgtcataatcaaggaaacacaggctccagcatatctcatagacctaatgcatgataagaataatgaaatccgaaaggtctgtgataatacattagatattatagcggaatatgatgaagaatgggctaagaaaattcagagtgaaaagtttcgctggcataactctcagtggctggagatggtagagagtcgtcagatggatgagagtgagcagtacttgtatggtgatgatcgaattgagccatacattcatgaaggagatattctcgaaagacctgaccttttctacaactcagatggattaattgcctctgaaggagccataagtcccgatttcttcaatgattaccaccttcaaaatggagatgttgttgggcagcattcatttcctggcagccttggaatggatggctttggccaaccagttggcattcttggacgccctgccacagcatatggattccgccctgatgaaccttactactatggctatggatcttga

SEQ ID NO: 628 - DNA, 1128 bp, Homo Sapiens
atgatgtgtcagtcagaggcgcggcaaggaccagagctccgcgcggcgaaatggttgcacttcccccagctggccctgaggcggaggctggggcagctgagctgcatgtccagacccgctctgaaactgcgctcctggcccttgaccgtcctctactacctcctgcccttcggcgccctcagaccgctcagccgggtgggatggaggcccgtaagcagggtggctttgtacaagtcagtgccaacgcgcttgctgtcacgggcctggggtcgcctcaatcaggtggagctgccacactggctgcgcaggcccgtctacagcctgtacatctggacgtttggggtgaacatgaaagaggccgctgtggaggacctgcatcactaccgcaacctcagcgagttcttccggcgcaagctgaagccgcaggcccggcctgtctgtggcctgcacagcgtgattagcccatcggatggaaggatcctcaactttgggcaggtgaagaactgtgaggtggagcaggtaaagggggtcacctactccctggagtcgttcctgggcccgcgtatgtgcacagaggacctgcccttcccaccagccgcgtcgtgtgactccttcaagaaccagctggtcacccgggaagggaatgagctctatcactgtgtcatctacctggcccctggggactaccactgcttccactcccccaccgactggactgtgtcccaccggcgccacttcccaggctccctgatgtcagtgaaccctggcatggctcgctggatcaaagagctcttctgccataacgagcgggtggtcctgacgggggactggaaacatggcttcttctcactgacagctgtgggggccaccaacgtgggctccattcgcatctactttgaccgggacctgcacacaaacagcccaaggcacagcaagggctcctacaatgacttcagcttcgtgacgcacaccaatagagagggcgtccccatgcgtaagggcgagcacctgggcgagttcaacctgggctccaccatcgtgctcatcttcgaggcccccaaggacttcaatttccagctgaaaacaggacagaaaatccgctttggggaagccctgggctcgctctag

SEQ ID NO: 629 - DNA, 837 bp, Homo Sapiens
atgggaccagtggaggccgcgcctgaataccgcgtcatcgtggatgccaacaacctgaccgtggagatcgaaaacgagctgaacatcatccataagttcatccgggataagtactcaaagagattccctgaactggagtccttggtccccaatgcactggattacatccgcacggtcaaggagctgggcaacagcctggacaagtgcaagaacaatgagaacctgcagcagatcctcaccaatgccaccatcatggtcgtcagcgtcaccgcctccaccacccaggggcagcagctgtcggaggaggagctggagcggctggaggaggcctgcgacatggcgctggagctgaacgcctccaagcaccgcatctacgagtatgtggagtcccggatgtccttcatcgcacccaacctgtccatcattatcggggcatccacggccgccaagatcatgggtgtgggcggcggcctgaccaacctctccaagatgcccgcctgcaacatcatgctgctcggggcccagcgcaagacgctgtcgggcttctcgtctacctcagtgctgccccacaccggctacatctaccacagtgacatcgtgcagtccctgccaccggatctgcggcggaaagcggcccggctggtggccgccaagtgcacactggcagcccgtgtggacagtttccacgagagcacagaagggaaggtgggctacgaactgaaggatgagatcgagcgcaaattcgacaagtggcaggagccgccgcctgtgaagcaggtgaagccgctgcctgcgcccctggatggacagcggaagaagcgaggcggccgcaggtga

SEQ ID NO: 630 - DNA, 720 bp, Homo Sapiens
atgcccaccgctaccgggctgactttgctgacatcagcatcctcagcgatttctgacccagggggtgaggtctctgcaccctgggggggccttaggacctggactcagcctctgagatgttgggagaggctactcccaccccctggtgaccccagaactgtggcagaaaatacacagcaggacgagtgtggtctcccaggaagctgtcctgcccgtcccctttcgaggaaacctgagtgtggtagagaggggatcctgccatgttgctcctcatcagcctggccagagggcagctttagaccttttcaaatgaatctgttttcttttctttcttttttttttcttttttttttttttttgagatggagtcttactctgtcacccaggctggagtgcagtagtgcgatctcagctcactgcaacctccgcctcccaggttcaagcaattctcctgccttggcctctcaagtagctgggattacaggcatctgccaccatgcccggcaaatttttgtgtttttagtagagacagggttttgccatgttggccaggctggtctcgaactcctgatctcaggtgattcacccgcctcagccttccaaagtgctgggattataggtgtgagccaccgtgcccggcctggatctgttttcttagcacgcagtgaggaatctttgtacttaaggccagggcaacaaagtcaagaggtcaaggtgtag

SEQ ID NO: 631 - DNA, 648 bp, Homo Sapiens
atgccgttccacccggtgacggcggcgttgatgtaccggggcatctacaccgtgcccaacctgctgtcggagcagcgcccggtggacatcccggaggacgagctggaggagatccgagaggccttcaaggtgtttgaccgtgacggcaatggcttcatctccaagcaggagctgggcacagccatgcgctcactgggttacatgcccaacgaggtggagctggaggtcatcatccagcggctggacatggatggtgatggtcaagtggactttgaggagtttgtgacccttctgggacccaaactctccacctcagggatcccagagaagttccatggcaccgactttgatactgtcttctggaagtgcgacatgcagaagctgacggtggatgagctgaagcggctgctctacgacaccttctgcgagcacctgtccatgaaggacatagagaacatcatcatgacggaggaggagagccacctgggcacagccgaggagtgtcccgtggatgtggagacctgctccaaccagcagatccgccagacttgcgtgcgcaagagtctcatctgcgccttcgccatcgccttcatcatcagtgtcatgctcattgcggccaaccaggtgctgcgcagtggcatgaagtag

SEQ ID NO: 632 - DNA, 858 bp, Homo Sapiens
atggctggcggatgggcccaaggttcccggcgtgcagcgcggctgcctgagggcggcaggctcatggcgccggcgtcgcggttgctcgcgctctgggcgctggcggctgtggctctacccggctccggggcggagggcgacggcgggtggcgcccgggcgggccgggggccgtggcggaggaggagcgctgcacggtggagcgtcgggccgacctcacctacgcggagttcgtgcagcagtacgccttcgtcaggcccgtcatcctgcagggactcacggacaactcgaggttccgggccctgtgctcccgcgacaggttgctggcttcgtttggggacagagtggtccggctgagcaccgccaacacctactcctaccacaaagtggacttgcccttccaggagtatgtggagcagctgctgcacccccaggaccccacctccctgggcaatgacaccctgtacttcttcggggacaacaacttcaccgagtgggcctctctctttcggcactactccccacccccatttggcctgctgggaaccgctccagcttacagctttggaatcgcaggagctggctcgggggtgcccttccactggcatggacccgggtactcagaagtgatctacggtcgtaagcgctggttcctttacccacctgagaagacgccagagttccaccccaacaagaccacgctggcctggctccgggacacatacccagccctgccaccgtctgcacggcccctggagtgtaccatccgggctggtgaggtgctgtacttccccgaccgctggtggcatgctacgctcaaccttgacaccagcgtcttcatctccaccttcctcggctag

SEQ ID NO: 633 - DNA, 1404 bp, Homo Sapiens
atgcagccgcagcacggtccttggcaaacaaggatgagaaaaatatccaaccacgggagcctgcgggtggcgaaggtggcataccccctggggctgtgtgtgggcgtgttcatctatgttgcctacatcaagtggcaccgggccaccgccacccaggccttcttcagcatcaccagggcagccccgggggcccggtggggtcagcaggcccacagccccctggggacagctgcagacgggcacgaggtcttctacgggatcatgtttgatgcaggaagcactggcacccgagtacacgtcttccagttcacccggccccccagagaaactcccacgttaacccacgaaaccttcaaagcactgaagccaggtctttctgcctatgctgatgatgttgaaaagagcgctcagggaatccgggaactactggatgttgctaaacaggacattccgttcgacttctggaaggccacccctctggtcctcaaggccacagctggcttacgcctgttacctggagaaaaggcccagaagttactgcagaaggtgaaagaagtatttaaagcatcgcctttccttgtaggggatgactgtgtttccatcatgaacggaacagatgaaggcgtttcggcgtggatcaccatcaacttcctgacaggcagcttgaaaactccaggagggagcagcgtgggcatgctggacttgggcggaggatccactcagatcgccttcctgccacgcgtggagggcaccctgcaggcctccccacccggctacctgacggcactgcggatgtttaacaggacctacaagctctattcctacagctacctcgggctcgggctgatgtcggcacgcctggcgatcctgggcggcgtggaggggcagcctgctaaggatggaaaggagttggtcagcccttgcttgtctcccagtttcaaaggagagtgggaacacgcagaagtcacgtacagggtttcagggcagaaagcagcggcaagcctgcacgagctgtgtgctgccagagtgtcagaggtccttcaaaacagagtgcacaggacggaggaagtgaagcatgtggacttctatgctttctcctactattacgaccttgcagctggtgtgggcctcatagatgcggagaagggaggcagcctggtggtgggggacttcgagatcgcagccaagtacgtgtgtcggaccctggagacacagccgcagagcagccccttctcatgcatggacctcacctacgtcagcctgctactccaggagttcggctttcccaggagcaaagtgctgaagctcactcggaaaattgacaatgttgagaccagctgggctctgggggccatttttcattacatcgactccctgaacagacagaagagtccagcctcatag

SEQ ID NO: 634 - DNA, 360 bp, Homo Sapiens
atgacccagcagggcgcggcgctgcagaactacaacaacgagctggtcaagtgcatagaggagctgtgccagaagcgggaggagctgtgccggcagatccaggaggaggaggacgagaagcagcggctgcagaatgaggtgaggcagctgacagagaagctggcccgcgtcaacgagaacctggcacgcaagattgcctctcgcaacgagttcgaccggaccatcgcggagacggaggccgcctacctcaagatcctggagagctcccagactttgctcagcgttctcaagagggaagctgggaacctgaccaaggctacagccccagaccagaaaagtagcggcggcagggacagctga

SEQ ID NO: 635 - DNA, 1290 bp, Homo Sapiens
atggcagcgaccgatatagctcgccaggtgggtgaaggttgccgaactgtccccctggctggacatgtggggtttgacagcttgcctgaccagctggtgaataagtccgtcagccagggcttctgcttcaacatcctgtgcgtgggagagacaggtttgggcaagtccaccctcatggacaccctgttcaacaccaaattcgaaggggagccagccacccacacacagccgggtgtccagctccagtctaatacctatgacctccaagagagcaacgtgaggctaaagctcacgatcgttagcacagttggctttggggaccagatcaacaaagaggacagctacaagcctatcgtggaattcatcgatgcacaattcgaggcctacctgcaggaagagctaaagatccgaagagtgctacacacctaccatgactcccgaatccatgtctgcttgtatttcattgcccccacgggtcattccctgaagtctctggacctagtgactatgaagaagctggacagtaaggtgaacatcatccccatcattgccaaagcagatgccatttcgaagagtgagctaacaaagttcaaaatcaaaatcaccagcgagcttgtcagcaacggagtccagatctatcagtttcctacagatgatgagtcggtggcagagatcaatggaaccatgaacgcccacctgccgtttgctgtcattggcagcacagaagaactgaagataggcaacaagatgatgagggcgcggcagtatccttggggcactgtgcaggttgaaaacgaggcccactgcgactttgtgaagctgcgggagatgctgattcgggtcaacatggaggatctgcgggagcagacccacacccggcactatgagctgtatcgccgctgtaagctggaggagatgggcttcaaggacaccgaccctgacagcaaacccttcagtttacaggagacatatgaggccaaaaggaacgagttcctaggggaactccagaaaaaagaagaggagatgagacagatgttcgtccagcgagtcaaagagaaagaagcggagctcaaagaggcagagaaagagctgcacgagaagtttgaccgtctgaagaaactgcaccaggacgagaagaagaaactggaggataagaagaaatccctggatgatgaagtgaatgctttcaagcaaagaaagacggcggctgagctgctccagtcccagggctcccaggctggaggctcacagactctgaagagagacaaagagaagaaaaactttttttaa

SEQ ID NO: 636 - DNA, 2577 bp, Homo Sapiens
atggacctcccggcgctgctccccgccccgactgcgcgcggagggcaacatggcggcggccccggcccgctccgccgagccccagcgccgctcggcgcgagccccgcgcgccgccgcctgctactggtgcggggccctgaagatggcgggcccggggcgcggcccggggaggcctccgggccaagcccgccgcccgccgaggacgacagcgacggcgactctttcttggtgctgctggaagtgccgcacggcggcgctgccgccgaggctgccggatcacaggaggccgagcctggctcccgtgtcaacctggcgagccgccccgagcagggccccagcggcccggccgccccccccggccctggcgtagccccggcgggcgccgtcaccatcagcagccaggacctgctggtgcgtctcgaccgcggcgtcctcgcgctgtctgcgccgcccggccccgcaaccgcgggcgccgccgctccccgccgcgcgccccaggcctccggccccagcacgcccggctaccgctgccccgagccgcagtgcgcgctggccttcgccaagaagcaccagctcaaggtgcacctgctcacgcacggcggcggtcagggccggcggcccttcaagtgcccactggagggctgtggttgggccttcacaacgtcctacaagctcaagcggcacctgcagtcgcacgacaagctgcggcccttcggctgtccagtgggcggctgtggcaagaagttcactacggtctataacctcaaggcgcacatgaagggccacgagcaggagagcctgttcaagtgcgaggtgtgcgccgagcgcttccccacgcacgccaagctcagctcccaccagcgcagccacttcgagcccgagcgcccttacaagtgtgactttcccggctgtgagaagacatttatcacagtgagtgccctgttttcccataaccgagcccacttcagggaacaagagctcttttcctgctcctttcctgggtgcagcaagcagtatgataaagcctgtcggctgaaaattcacctgcggagccatacaggtgaaagaccatttatttgtgactctgacagctgtggctggaccttcaccagcatgtccaaacttctaaggcacagaaggaaacatgacgatgaccggaggtttacctgccctgtcgagggctgtgggaaatcattcaccagagcagagcatctgaaaggccacagcataacccacctaggcacaaagccgttcgagtgtcctgtggaaggatgttgcgcgaggttctccgctcgtagcagtctgtacattcactctaagaaacacgtgcaggatgtgggtgctccgaaaagccgttgcccagtttctacctgcaacagactcttcacctccaagcacagcatgaaggcgcacatggtcagacagcacagccggcgccaagatctcttacctcagctagaagctccgagttctcttactcccagcagtgaactcagcagcccaggccaaagtgagctcactaacatggatcttgctgcactcttctctgacacacctgccaatgctagtggttctgcaggtgggtcggatgaggctctgaactccggaatcctgactattgacgtcacttctgtgagctcctctctgggagggaacctccctgctaataatagctccctagggccgatggaacccctggtcctggtggcccacagtgatattcccccaagcctggacagccctctggttctcgggacagcagccacggttctgcagcagggcagcttcagtgtggatgacgtgcagactgtgagtgcaggagcattaggctgtctggtggctctgcccatgaagaacttgagtgacgacccactggctttgacctccaatagtaacttagcagcacatatcaccacaccgacctcttcgagcaccccccgagaaaatgccagtgtcccggaactgctggctccaatcaaggtggagccggactcgccttctcgcccaggagcagttgggcagcaggaaggaagccatgggctgccccagtccacgttgcccagtccagcagagcagcacggtgcccaggacacagagctcagtgcaggcactggcaacttctatttggaaagtgggggctcagcaagaactgattaccgagccattcaactagccaaggaaaaaaagcagagaggagcggggagcaatgcaggagcctcacagtctactcagagaaaaataaaagaaggcaaaatgagtcctccccatttccatgcaagccagaacagttggttgtgtgggagcctcgtggtgcccagcggaggacggccaggaccagctccagcagctggggtgcagtgcggggcgcagggcgtccaggtccagctggtgcaggatgacccctccggcgaaggtgtcctgccctcggcccgcggcccagccaccttcctccccttcctcactgtggacctgcccgtctacgtcctccaggaggtgctcccctcatctggaggccctgctggaccggaggccacccagttcccaggaagcactatcaacctgcaggatctgcagtga

SEQ ID NO: 637 - DNA, 1611 bp, Homo Sapiens
atggcaacccgcgcgcagccggggccactcagccaggcgggaagcgctggtgttgcggcgctggcgacagtcggggttgcgagcggcccggggccggggcggccagggccgctgcaggacgagaccctgggtgtggcgtccgtgccctcgcagtggagggccgtccagggcatccgctgggagacgaaaagttgccagacggccagcattgccactgccagtgcatccgcccaggccaggaatcatgtggacgcccaggtgcagacggaggcccccgtgcctgtcagcgtgcagcccccgtcccagtatgacatacccaggctcgcagcctttcttcggagagtggaggccatggtcatccgagagctgaacaagaattggcagagccacgcgtttgatggcttcgaggtgaactggaccgagcagcagcagatggtgtcttgtctgtataccctgggctacccgccagcccaagcgcagggtctgcatgtgaccagcatctcctggaactccactggctctgtggtggcctgtgcctacggccggctggaccatggggactggagcacgcttaagtccttcgtgtgtgcctggaacctggaccggcgagacctgcgtccccagcagccgtcggccgtggtggaggtccccagcgctgtcctgtgtctggccttccaccccacgcagccctcccacgtcgcaggagggctgtacagtggtgaggtgttggtgtgggacctgagccgtcttgaggacccgctgctgtggcgcacaggcctgacggatgacacccacacagaccctgtgtcccaggtggtgtggctgcccgagcctgggcacagccaccgcttccaggtgctgagtgtggccaccgacgggaaggtgctactctggcagggcatcggggtaggccagctgcagctcacagagggcttcgccctggtcatgcagcagctgccacggagcaccaagctcaagaagcatccccgcggggagaccgaggtgggcgccacggcagtggccttctccagctttgaccctaggctgttcattctgggcacggaaggcggcttcccgctcaagtgttccctggcagctggagaggcagccctcacgcggatgcccagctccgtgcccctgcgggccccagcacagtttaccttctccccccacggcggtcccatctactctgtgagctgttcccccttccacaggaatctcttcctgagcgctgggactgacgggcatgtccacctgtactccatgctgcaggcccctcccttgacttcgctgcagctctccctcaagtatctgtttgctgtgcgctggtccccagtgcggcccttggtttttgcagctgcctctgggaaaggtgacgtgcagctgtttgatctccagaaaagctcccagaaacccacagttttgatcaagcaaacccaggatgaaagccctgtctactgtctggagttcaacagccagcagactcagctcttggctgcgggcgatgcccagggcacagtgaaggtgtggcagctgagcacagagttcacggaacaagggccccgggaagctgaggacctggactgcctggcagcagaggtggcggcctga

SEQ ID NO: 638 - DNA, 837 bp, Homo Sapiens
atggagccgcaggaggagagagaaacgcaggttgctgcgtggttaaaaaaaatatttggagatcatcctattccacagtatgaggtgaacccacggaccacagagattttacatcacctttcagaacgcaacagggtccgggacagggatgtctacctggtaatagaggacttgaagcagaaagcaagtgaatacgagtcagaagccaagtatcttcaagaccttctcatggagagtgtgaatttttcccccgccaatctctctagcactggttccaggtatctgaatgctttggttgacagtgcggtggcccttgaaacaaaggatacctcgctagctagttttatccctgcagtgaatgatttgacctctgatctctttcgtaccaaatccaaaagtgaagaaatcaagattgaactggaaaaacttgaaaaaaatttaactgcaactttagtattagaaaaatgtctacaagaggatgtcaagaaagcagagttgcatctgtctacagaaagggccaaagttgataatcgtcgtcagaacatggactttctaaaagcaaagtcagaggaattcagatttggaatcaaggctgcagaggagcaactttcagccagaggcatggatgcttctctgtctcatcagtccttagtagcactatcagagaaactggcaagattaaagcaacagactatacctttgaagaaaaaattggagtcctatttagacttaatgccgaatccgtctcttgctcaagtgaaaattgaagaagcaaagcgagaactagatagcattgaagctgaacttacaagaagagtagacatgatggaactgtga

SEQ ID NO: 639 - DNA, 2961 bp, Homo Sapiens
atgcccggcgtggcccgcctgccgctgctgctcgggctgctgctgctcccgcgtcccggccggccgctggacttggccgactacacctatgacctggcggaggaggacgactcggagcccctcaactacaaagacccctgcaaggcggctgcctttcttggggacattgccctggacgaagaggacctgagggccttccaggtacagcaggctgtggatctcagacggcacacagctcgtaagtcctccatcaaagctgcagttccaggaaacacttctacccccagctgccagagcaccaacgggcagcctcagaggggagcctgtgggagatggagaggtagatcccgtagccggcgggcggcgacgtcccgaccagagcgtgtgtggcccgatggggtcatcccctttgtcattgggggaaacttcactggtagccagagggcagtcttccggcaggccatgaggcactgggagaagcacacctgtgtcaccttcctggagcgcactgacgaggacagctatattgtgttcacctatcgaccttgcgggtgctgctcctacgtgggtcgccgcggcgggggcccccaggccatctccatcggcaagaactgtgacaagttcggcattgtggtccacgagctgggccacgtcgtcggcttctggcacgaacacactcggccagaccgggaccgccacgtttccatcgttcgtgagaacatccagccagggcaggagtataacttcctgaagatggagcctcaggaggtggagtccctgggggagacctatgacttcgacagcatcatgcattacgctcggaacacattctccaggggcatcttcctggataccattgtccccaagtatgaggtgaacggggtgaaacctcccattggccaaaggacacggctcagcaagggggacattgcccaagcccgcaagctttacaagtgcccagcctgtggagagaccctgcaagacagcacaggcaacttctcctcccctgaataccccaatggctactctgctcacatgcactgcgtgtggcgcatctctgtcacacccggggagaagatcatcctgaacttcacgtccctggacctgtaccgcagccgcctgtgctggtacgactatgtggaggtccgagatggcttctggaggaaggcgcccctccgaggccgcttctgcgggtccaaactccctgagcctatcgtctccactgacagccgcctctgggttgaattccgcagcagcagcaattgggttggaaagggcttctttgcagtctacgaagccatctgcgggggtgatgtgaaaaaggactatggccacattcaatcgcccaactacccagacgattaccggcccagcaaagtctgcatctggcggatccaggtgtctgagggcttccacgtgggcctcacattccagtcctttgagattgagcgccacgacagctgtgcctacgactatctggaggtgcgcgacgggcacagtgagagcagcaccctcatcgggcgctactgtggctatgagaagcctgatgacatcaagagcacgtccagccgcctctggctcaagttcgtctctgacgggtccattaacaaagcgggctttgccgtcaactttttcaaagaggtggacgagtgctctcggcccaaccgcgggggctgtgagcagcggtgcctcaacaccctgggcagctacaagtgcagctgtgaccccgggtacgagctggccccagacaagcgccgctgtgaggctgcttgtggcggattcctcaccaagctcaacggctccatcaccagcccgggctggcccaaggagtacccccccaacaagaactgcatctggcagctggtggcccccacccagtaccgcatctccctgcagtttgacttctttgagacagagggcaatgatgtgtgcaagtacgacttcgtggaggtgcgcagtggactcacagctgactccaagctgcatggcaagttctgtggttctgagaagcccgaggtcatcacctcccagtacaacaacatgcgcgtggagttcaagtccgacaacaccgtgtccaaaaagggcttcaaggcccacttcttctcagacaaggacgagtgctccaaggataacggcggctgccagcaggactgcgtcaacacgttcggcagttatgagtgccaatgccgcagtggcttcgtcctccatgacaacaagcacgactgcaaagaagccggctgtgaccacaaggtgacatccaccagtggtaccatcaccagccccaactggcctgacaagtatcccagcaagaaggagtgcacgtgggccatctccagcacccccgggcaccgggtcaagctgaccttcatggagatggacatcgagtcccagcctgagtgtgcctacgaccacctagaggtgttcgacgggcgagacgccaaggcccccgtcctcggccgcttctgtgggagcaagaagcccgagcccgtcctggccacaggcagccgcatgttcctgcgcttctactcagataactcggtccagcgaaagggcttccaggcctcccacgccacagagtgcgggggccaggtacgggcagacgtgaagaccaaggacctttactcccacgcccagtttggcgacaacaactaccctgggggtgtggactgtgagtgggtcattgtggccgaggaaggctacggcgtggagctcgtgttccagacctttgaggtggaggaggagaccgactgcggctatgactacatggagctcttcgacggctacgacagcacagcccccaggctggggcgctactgtggctcagggcctcctgaggaggtgtactcggcgggagattctgtcctggtgaagttccactcggatgacaccatcaccaaaaaaggtttccacctgcgatacaccagcaccaagttccaggacacactccacagcaggaagtga

SEQ ID NO: 640 - DNA, 496 bp, Homo Sapiens
atggccgagagaaagcaatccgggaaggcggcagaggacgaagaggtccctgctttttttaaaaacctgggctccggcagccccaagccccggcagaaattctgtggcatgttctgcccggtggaagggtcctcggagaacaagaccatcgacttcgactcgctgtcggtgggccggggctcggggcaggtggtggctcagcagcgggacgtcgcccacttgggcccggacccgcagccgccgtactcgcggcagggccggcgcgccggcggagagccatctgttgaatcgggccggaaggtggagatccggagggcctcgggcaaagaagccctgcagaacatcaacgaccagagcgatcgtcttctgatcaaaggaggtaaaattgttaatgatgaccagtcgttctatgcagacatatacatggaagatgggttgatcaagcaaataggagaaaatctgattgtgccaggaggagtgaagaccatcgaggccc

SEQ ID NO: 641 - DNA, 828 bp, Homo Sapiens
atgccgtacgccaaccagcctaccgtgcggatcacggagctcactgacgagaatgtcaagttcatcatcgagaacaccgacctggcggtggccaattcgattcggagggtcttcatcgctgaggttcccataatagccattgactgggttcagattgatgccaattcctcagttcttcatgatgaattcattgctcacaggcttggattaattcccctcattagtgatgacattgtggacaagctgcagtactctcgggactgcacatgtgaggagttctgccccgagtgctcggtggagttcaccctcgatgtgcggtgcaatgaagaccagacgcgacatgtcacgtctcgagacctcatctccaacagcccccgggtcattccggtgacatcccggaaccgagataatgaccccaatgactacgtggagcaggatgacatcctcatcgtcaagttgagaaagggccaggagctgagacttcgagcctatgccaaaaagggctttggcaaggagcatgccaagtggaaccctactgcaggggtggcttttgaatacgatccagacaatgccctgaggcacacagtgtaccccaagcccgaggaatggccaaagagtgagtactcggagctggatgaggatgagtcgcaggctccctatgaccccaacggcaagccagaaaggttttactacaatgtggagtcctgtggctctctgcgtcctgaaaccattgtcctgtcagccctctcaggattgaagaagaaactgagtgatttacaaactcaattaagccacgagatccagagtgatgtgctaaccataaattaa

SEQ ID NO: 642 - DNA, 11493 bp, Homo Sapiens
atggcgtttgttgcaacacagggggccacggtggttgaccagaccactttgatgaaaaagtaccttcagtttgtggcagctctcacagatgtgaatacacctgatgaaacaaagttgaaaatgatgcaagaagttagtgaaaattttgagaatgtcacgtcatctcctcagtattctacattcctagaacatatcatccctcgattccttacatttctccaagatggagaagttcagtttcttcaggagaaaccagcacagcaactgcggaagctcgtacttgaaataattcatagaataccaaccaacgaacatcttcgtcctcacacaaaaaatgttttgtctgtgatgtttcgctttttagagacggaaaatgaagaaaatgttcttatttgtctaagaataattattgagctacacaaacagttcaggccaccgatcacacaagaaattcatcattttctggattttgtgaaacagatttacaaggagcttccaaaagtagtgaaccgctactttgagaaccctcaagtgatccccgagaacacagtgcctcccccagaaatggttggtatgataacaacgattgctgtgaaagtcaacccggagcgtgaggacagtgagactcgaacacattccatcattccgaggggatcactttctctgaaagtgttggcagaattgcccattattgttgttttaatgtatcagctctacaaactgaacatccacaatgttgttgctgagtttgtgcccttgatcatgaacaccattgccattcaggtgtctgcacaagcgaggcaacataagctttacaacaaggagttgtatgctgacttcattgctgctcagattaaaacattgtcatttttagcttacattatcaggatttaccaggagttggtgactaagtattctcagcagatggtgaaaggaatgctccagttactttcaaattgtccagcagagactgcacacctcagaaaggagcttctgattgctgccaaacacatcctcaccacagagctgagaaaccagttcattccttgcatggacaagctgtttgatgaatccatactaattggctcaggatatactgccagagagactctaaggcccctcgcctacagcacgctggccgacctcgtgcaccatgtccgccagcacctgcccctcagcgacctctccctcgccgtccagctcttcgccaagaacatcgacgatgagtccctgcccagcagcatccagaccatgtcctgcaagctcctgctgaacctggtggactgcatccgttccaagagcgagcaggagagtggcaatgggagagacgtcctgatgcggatgctggaggttttcgttctcaaattccacacaattgctcggtaccagctctctgccatttttaagaagtgtaagcctcagtcagaacttggagccgtggaagcagctctgcctggggtgcccactgcccctgcagctcctggccctgctccctccccagcccctgtccctgccccacctccacccccgcccccacccccacctgccacccctgtgaccccggcccccgtgcctcccttcgagaagcaaggagaaaaggacaaggaagacaagcagacattccaagtcacagactgtcgaagtttggtcaaaaccttggtgtgtggtgtcaagacaatcacgtggggcataacatcatgcaaagcacctggtgaagctcagttcattcccaacaagcagttacaacccaaagagacacagatttacatcaaacttgtgaaatatgcaatgcaagctttagatatttatcaggtccagatagcaggaaatggacagacatacatccgtgtggccaactgccagactgtgagaatgaaagaggagaaggaggtattggagcatttcgctggtgtgttcacaatgatgaaccccttaacgttcaaagaaatcttccaaactacggtcccttatatggtggagagaatctcaaaaaattatgctcttcagattgttgccaattccttcttggcaaatcctactacctctgctctgtttgctacgattctggtggaatatctccttgatcgcctgccagaaatgggctccaacgtggagctctccaacctgtacctcaagctgttcaagctggtctttggctctgtctccctctttgcagctgaaaatgaacaaatgctgaagcctcacttgcacaagattgtgaacagctctatggagctcgcgcagactgccaaggaaccctacaactacttcttgctgctacgggcgctgtttcgctctattggtggaggtagccacgatctcttgtatcaggagttcttgcctctccttccaaacctcctgcaagggctgaacatgcttcagagtggcctgcacaagcagcacatgaaggacctctttgtggagctgtgtctcaccgtccctgtgcggctgagctcgcttttgccgtacctgcccatgcttatggatcccttggtgtctgcactcaatgggtctcagacattggtcagccaaggcctcaggacgctggagctgtgtgtggacaacctgcagcccgacttcctctacgaccacatccagccggtgcgcgcagagctcatgcaggctctgtggcgcaccttacgcaaccctgctgacagcatctcccacgtggcctaccgtgtgctcggtaagtttggcggcagtaacaggaagatgctgaaggagtcgcagaagctgcactacgttgtgaccgaggttcagggccccagcatcactgtggagttttccgactgcaaagcttctctccagctccccatggagaaggccattgaaactgctctggactgcctgaaaagcgccaacactgagccctactaccggaggcaggcgtgggaagtgatcaaatgcttcctggtggccatgatgagcctggaggacaacaagcacgcactctaccagctcctggcacaccccaactttacagaaaagaccatccccaatgttatcatctcacatcgctacaaagcccaggacactccagcccggaagacttttgagcaggccctgacaggcgccttcatgtctgctgtcattaaggacctgcggcccagcgccctgccctttgtcgccagcttgatccgccactatacgatggtggcagtcgcccagcagtgtggccctttcttgctgccttgctaccaggtgggcagccagcccagcacagccatgtttcacagtgaagaaaatggctcgaaaggaatggatcctttggttctcattgatgcaattgctatttgtatggcatatgaagaaaaggagctttgcaaaatcggggaggtggccctagctgtgatatttgatgttgcaagtatcatcctgggctccaaggagagggcctgccagctgcccctgttttcttacatcgtggagcgcctgtgtgcatgttgttatgaacaggcgtggtatgcaaagctggggggtgtggtgtctattaagtttctcatggagcggctgcctctcacttgggttctccagaaccagcagacattcctgaaagcacttctctttgtcatgatggacttaactggagaggtttccaatggggcagtcgctatggcaaagaccacgctggagcagcttctgatgcggtgcgcaacgcctttaaaagacgaggagagagccgaagagatcgtggccgcccaggaaaagtctttccaccatgtgacacacgacttggttcgagaagtcacctctccaaactccactgtgaggaagcaggccatgcattcgctgcaggtgttggcccaggtcactgggaagagtgtcacggtgatcatggaaccccacaaagaggtcctgcaggatatggtcccccctaagaagcacctgctccgacaccagcctgccaacgcacagattggcctgatggaggggaacacgttctgtaccacgttgcagcccaggctcttcacaatggaccttaacgtggtggagcataaggtgttctacacagagctgttgaatttgtgtgaggctgaagattcagctttaacaaagctgccctgttataaaagccttccgtcactcgtacctttacgaattgcggcattaaatgcacttgctgcctgcaattaccttcctcagtccagggagaaaatcatcgctgcactcttcaaagccctgaattccaccaatagtgagctccaagaggccggagaagcctgtatgagaaagtttttagaaggtgctaccatagaagtcgatcaaatccacacacatatgcgacctttgctgatgatgctgggagattaccggagcttgacgctgaatgttgtgaatcgcctgacttcggtcacgaggctcttcccaaattccttcaatgataaattttgtgatcagatgatgcaacatctgcgcaagtggatggaagtggtggtgatcacccacaaagggggccagaggagcgacggaaacgaaatgaagatttgctcagcaattataaacctttttcatctgatcccggctgctcctcagacactggtgaagcctttgctagaggttgtcatgaaaacggagcgggcgatgctgatcgaggcggggagtccattccgagagcccctgatcaagttcctgactcgacatccctcgcagacagtggagctgttcatgatggaagccacactgaacgatccccagtggagcagaatgtttatgagttttttaaaacacaaagacgccagacctctgcgggatgtgctggctgccaaccccaacaggttcatcaccctgctgctgccggggggtgcccagacggctgtgcgccccggttcgcccagcaccagcaccatgcgcctggacctccagttccaggccatcaagatcataagcattatagtgaaaaacgatgactcctggctggccagccagcactctctggtgagccagttgcgacgtgtgtgggtgagtgagaacttccaagagaggcaccgcaaggagaacatggcagccaccaactggaaggagcccaagctgctggcctactgcctgctgaactactgcaaaaggaattacggagatatagaattgctgttccagctgctccgagcctttactggtcgttttctctgcaacatgacattcttaaaagagtatatggaggaagagattcccaaaaattacagcatcgctcagaaacgtgccctgttctttcgctttgtagacttcaacgaccccaacttcggagatgaattaaaagctaaagttctgcagcatatcttgaatcctgctttcttgtacagctttgagaagggggaaggagagcagctcttgggacctcccaatccagaaggagataacccagaaagcatcaccagtgtgtttattaccaaggtcctggaccccgagaagcaggcggacatgctggactcgctgcggatctacctgctgcagtacgccacgctgctggtggagcacgccccccaccacatccatgacaacaacaagaaccgcaacagcaagctgcgccgcctcatgaccttcgcctggccctgcctgctctccaaggcctgcgtggacccagcctgcaagtacagcggacacttgctcctggcgcacattatcgccaaattcgccatacacaagaagatcgtcctgcaggtttttcatagtctcctcaaggctcacgcaatggaagctcgagcgatcgtcagacaggcgatggccattctgaccccggcggtgccggccaggatggaggacgggcaccagatgctgacccactggacccggaagatcattgtggaggaggggcacaccgtcccgcagctggtccacattctgcacctgatagtgcaacacttcaaggtgtactacccggtacggcaccacttggtgcagcacatggtgagcgccatgcagaggctgggcttcacgcccagtgtcaccatcgagcagaggcggctggccgtggacctgtctgaagtcgtcatcaagtgggagctgcagaggatcaaggaccagcagccggattcagatatggacccaaattccagtggagaaggagtcaattctgtctcatcctccattaagagaggcctgtccgtggattctgcccaggaagtgaaacgctttaggacggccaccggagccatcagtgcagtctttgggaggagccagtcgctacctggagcagactctctcctcgccaagcccattgacaagcagcacacagacactgtggtgaacttccttatccgcgtggcctgtcaggttaatgacaacaccaacacagcggggtcccctggggaggtgctctctcgccggtgtgtgaaccttctgaagactgcgttgcggccagacatgtggcccaagtccgaactcaagctgcagtggttcgacaagctgctgatgactgtggagcagccaaaccaagtgaactatgggaatatctgcacgggcctagaagtgctgagcttcctgctaactgtcctccagtccccagccatcctcagtagcttcaaacctctgcagcgtggaattgccgcctgcatgacatgtggaaacaccaaggtgttgcgagccgtccacagccttctctcgcgcctgatgagcattttcccaacagagccgagtacttccagtgtggcctccaaatatgaagagctggagtgcctctacgcagccgtcggaaaggtcatctatgaagggctcaccaactacgagaaggccaccaatgccaatccctcccagctcttcgggacccttatgatcctcaagtctgcctgcagcaacaaccccagctacatagacaggctgatctccgtctttatgcgctccctgcagaagatggtccgggagcatttaaaccctcaggcagcgtcaggaagcaccgaagccacctcaggtacaagcgagctggtgatgctgagtctggagctggtgaagacgcgcctggcagtgatgagcatggagatgcggaagaacttcatccaggccatcctgacatccctcatcgaaaaatcaccagatgccaaaatcctccgggctgtggtcaaaatcgtggaagaatgggtcaagaataactccccaatggcagccaatcagacacctacactccgggagaagtccattttgcttgtgaagatgatgacttacatagaaaaacgctttccggaagaccttgaattaaatgcccagtttttagatcttgttaactatgtctacagggatgagaccctctctggcagcgagctgacggcgaaacttgagcctgcctttctctctgggctgcgctgtgcccagccactcatcagggcaaagtttttcgaggtttttgacaactccatgaaacgtcgtgtctacgagcgcttgctctatgtgacctgttcgcagaactgggaagccatggggaaccacttctggatcaagcagtgcattgagctgcttctggccgtgtgtgagaagagcacccccattggcaccagctgccaaggagccatgctcccgtccatcaccaacgtcatcaacctggccgatagccacgaccgtgccgccttcgccatggtcacacatgtcaagcaggagccccgggagcgggagaacagcgagtccaaagaggaggatgtagagatagacatcgaactagctcctggggatcagaccagcacgcccaaaaccaaagaactttcagaaaaggacattggaaaccagctgcacatgctaaccaacaggcacgacaagtttctggacactctccgagaggtgaagactggagcgctgctcagcgctttcgttcagctgtgccacatttccacgacgctggcagagaagacgtgggtccagcttttccccagattgtggaagatcctctctgacagacagcagcatgcactcgcgggtgagataagtccatttctgtgcagcggcagtcaccaggtgcagcgggactgccagcccagcgcgctgaactgctttgtggaagccatgtcccagtgcgtgccgccaatccccatccgaccctgcgtcctgaagtacctggggaagacacacaacctctggttccggtccacgctgatgttggagcaccaggcttttgaaaagggtctgagtcttcagattaagccgaagcaaacaacggagttttatgagcaggagagcatcaccccgccgcagcaggagatactggattcccttgcggagctttactccctgttacaagaggaagatatgtgggctggtctgtggcagaagcggtgcaagtactcggagacagcgactgcgattgcttacgagcagcacgggttctttgagcaggcacaagaatcctatgaaaaggcaatggataaagccaaaaaagaacatgagaggagtaacgcctcccctgctattttccctgaataccagctctgggaagaccactggattcgatgctccaaggaattgaaccagtgggaagccctgacggagtacggtcagtccaaaggccacatcaacccctacctcgtcctggagtgcgcctggcgggtgtccaactggactgccatgaaggaggcgctggtgcaggtggaagtgagctgtccgaaggagatggcctggaaggtgaacatgtaccgcggatacctggccatctgccaccccgaggagcagcagctcagcttcatcgagcgcctggtggagatggccagcagcctggccatccgcgagtggcggcggctgccccacgtagtgtcccacgtgcacacgcctctcctacaggcagcccagcaaatcatcgaactccaggaagctgcacaaatcaacgcaggcttacagccaaccaacctgggaaggaacaacagcctgcacgacatgaagacggtggtgaagacctggaggaaccgactgcccatcgtgtctgacgacttgtcccactggagcagcatcttcatgtggaggcagcatcattaccaggcgattgtaactgcctatgagaatagctctcagcatgatcccagttcaaataacgctatgcttggggttcatgcatcagcttcagcgatcatccagtatggaaaaatcgcccggaaacaaggactggtcaatgtagctctggatatattaagtcggattcatactattccaactgttcctatcgtggattgcttccagaagattcgacagcaagttaaatgctacctccagctggcaggcgtcatgggcaaaaacgagtgcatgcagggccttgaagttattgaatctacaaatttaaaatacttcacaaaagagatgacagccgaattttatgcactgaagggaatgttcttggctcagatcaacaagtccgaggaggcaaacaaagccttctctgcagctgtgcagatgcacgatgtgctggtgaaagcctgggccatgtggggcgactacctggagaacatctttgtgaaggagcggcagctgcacctgggcgtgtctgccatcacctgctacctgcacgcctgccggcatcagaacgagagcaaatcgaggaaatacttagccaaggtgctgtggcttttgagttttgatgatgacaaaaacactttggcagatgccgtcgacaagtactgcattggtgtgccacccatccagtggctggcctggatcccacagctgctcacctgcctggttggctcggagggaaagctgctcttgaacctcattagccaggttggacgcgtgtatccccaagcggtctactttcccatccggaccctgtacctgaccctgaaaatagaacagcgggaacgctacaagagcgatccagggcccataagagcaacagcacccatgtggcgctgcagccgaatcatgcacatgcagcgagagctccaccccacccttctgtcttccctggaaggcatcgtcgatcagatggtctggttcagagaaaattggcatgaagaggttctcaggcagctccaacagggcctggcgaaatgttactccgtggcgtttgagaaaagtggagcggtgtccgatgctaaaatcaccccccacactctcaattttgtgaagaagttggtgagcacgtttggggtgggcctggagaatgtgtccaacgtctcgaccatgttctccagcgcagcctctgagtctctggcccggcgggcgcaggccactgcacaagaccctgtctttcagaagctgaaaggccagttcacgacggattttgacttcagcgttccaggatccatgaagcttcataatcttatttctaagttgaaaaagtggatcaaaatcttggaggccaagaccaagcaactccccaaattcttcctcatagaggaaaagtgccggttcttgagcaatttctcggcacagacagctgaagtggaaattcctggggagtttctgatgccaaagccaacgcattattacatcaagattgcacggttcatgccccgggtagagattgtgcagaagcacaacaccgcagcccggcggctgtacatccggggacacaatggcaagatctacccatacctcgtcatgaacgacgcctgcctcacagagtcacggcgagaggagcgtgtgttgcagctgctgcgtctgctgaacccctgtttggagaagagaaaggagaccaccaagaggcacttgtttttcacagtgccccgggttgtggcagtttccccacagatgcgcctcgtggaggacaacccctcttcactttcccttgtggagatctacaagcagcgctgcgccaagaagggcatcgagcatgacaaccccatctcccgttactatgaccggctggctacggtgcaggcgcggggaacccaagccagccaccaggtcctccgcgacatcctcaaggaggttcagagtaacatggtgccgcgcagcatgctcaaggagtgggcgctgcacaccttccccaatgccacggactactggacgttccggaagatgttcaccatccagctggctctgataggcttcgcggaattcgtcctgcatttaaatagactcaaccccgagatgttacagatcgctcaggacactggcaaactgaatgttgcctactttcgatttgacataaacgacgcgactggagacctggatgccaaccgtcctgtcccatttcgactcacgcccaacatttctgagtttctgaccaccatcggggtctccggcccgttgacagcgtccatgattgcggtcgcccggtgcttcgcccagccaaactttaaggtggatggcattctgaaaacggttctccgggacgagatcattgcttggcacaaaaaaacacaagaggacacgtcctctcctctctcggccgccgggcagccagagaacatggacagccagcaactggtgtccctggttcagaaagccgtcaccgccatcatgacccgcctgcacaacctcgcccagttcgaaggcggggaaagcaaggtgaacaccctggtggccgcggcaaacagcctggacaatctgtgccgcatggaccccgcctggcacccctggctgtga

SEQ ID NO: 643 - DNA, 2403 bp, Homo Sapiens
atggggtcgtccaagaagcatcgcggagagaaggaggcggccgggacgacggcggcggccggcaccgggggtgccaccgagcagccgccgcggcaccgggaacacaaaaaacacaagcaccggagtggcggcagtggcggtagcggtggcgaacgacggaagcggagccgggaacgtgggggcgagcgcgggagcgggcggcgcggggccgaagctgaggcccggagcagcacgcacgggcgggagcgcagccaggcagagccctccgagcggcgcgtgaagcgggagaagcgcgatgacggctacgaggccgctgccagctccaaaactagctcaggcgatgcctcctcactcagcatcgaggagactaacaaactccgggcaaagttggggctgaaacccttggaggttaatgccatcaagaaggaggcgggcaccaaggaggagcccgtgacagctgatgtcatcaaccctatggccttgcgacagcgagaggagctgcgggagaagctggcggctgccaaggagaagcgcctgctgaaccaaaagctggggaagataaagaccctaggagaggatgacccctggctggacgacactgcagcctggatcgagaggagccggcagctgcagaaggagaaggacctggcagagaagagggccaagttactggaggagatggaccaagagtttggtgtcagcactctggtggaggaggagttcgggcagaggcggcaggacctgtacagtgcccgggacctgcagggcctcaccgtggagcatgccattgattccttccgagaaggggagacaatgattcttaccctcaaggacaaaggcgtgctgcaggaggaggaggacgtgctggtgaacgtgaacctggtggataaggagcgggcagagaaaaatgtggagctgcggaagaagaagcctgactacctgccctatgccgaggacgagagcgtggacgacctggcgcagcaaaaacctcgctctatcctgtccaagtatgacgaagagcttgaaggggagcggccacattccttccgcttggagcagggcggcacggctgatggcctgcgggagcgggagctggaggagatccgggccaagctgcggctgcaggctcagtccctgagcacagtggggccccggctggcctccgaatacctcacgcctgaggagatggtgacctttaaaaagaccaagcggagggtgaagaaaatccgcaagaaggagaaggaggtagtagtgcgggcagatgacttgctgcctctcggggaccagactcaggatggggactttggttccagactgcggggacggggtcgccgccgagtgtccgaagtggaggaggagaaggagcctgtgcctcagcccctgccgtcggacgacacccgagtggagaacatggacatcagtgatgaggaggaaggtggagctccaccgccggggtccccgcaggtgctggaggaggacgaggcggagctggagctgcagaagcagctggagaagggacgccggctgcgacagttacagcagctacagcagctgcgagacagtggcgagaaggtggtggagattgtgaagaagctggagtctcgccagcggggctgggaggaggatgaggatcccgagcggaagggggccatcgtgttcaacgccacgtccgagttctgccgcaccttgggggagatccccacctacgggctggctggcaatcgcgaggagcaggaggagctcatggactttgaacgggatgaggagcgctcagccaacggtggctccgaatctgacggggaggagaacatcggctggagcacggtgaacctggacgaggagaagcagcagcaggatttctctgcttcctccaccaccatcctggacgaggaaccgatcgtgaatagggggctggcagctgccctgctcctgtgtcagaacaaagggctgctggagaccacagtgcagaaggtggcccgggtgaaggcccccaacaagtcgctgccctcagccgtgtactgcatcgaggataagatggccatcgatgacaagtacagccggagggaggaataccgaggcttcacacaggacttcaaggagaaggacggctacaaacccgacgttaagatcgaatacgtggatgagacgggccggaaactcacacccaaggaggctttccggcagctgtcgcaccgcttccatggcaagggctcaggcaagatgaagacagagcggcggatgaagaagctggacgaggaggcgctcctgaagaagatgagctccagcgacacgcccctgggcaccgtggccctgctccaggagaagcagaaggctcagaagaccccctacatcgtgctcagcggcagcggcaagagcatgaacgcgaacaccatcaccaagtga

SEQ ID NO: 644 - DNA, 2505 bp, Homo Sapiens
atggcggtggaggacgaggggctccgggtcttccagagcgtgaagatcaagatcggtgaagccaaaaaccttccctcttacccggggccgagcaagatgagggattgctactgcacggtgaacctggaccaggaggaggttttcaggaccaaaattgtggaaaagtcactctgcccgttttacggagaagacttttactgtgaaattcctcggagctttcgtcacctgtccttctacattttcgatagagacgttttccggagggattccatcatagggaaggtggccatccagaaggaggacttgcagaagtaccacaacagggacacctggttccagctgcagcacgtggacgctgactcggaagtgcagggcaaagtgcacctggagctgcggctgagcgaggtcatcacagacactggggtcgtctgccacaagctcgccacacgcatcgtcgagtgccagggcctccccatcgtgaatgggcaatgtgacccctacgccaccgtgacgctggcaggacccttcagatcagaagcaaagaagacgaaagtgaagaggaagaccaacaatccccagttcgatgaagtgttttattttgaggtgacccggccctgtagctacagcaagaagtcccactttgactttgaggaggaagacgtggacaagctcgaaatcagagttgacctctggaatgccagtaacctgaagtttggagatgaattcctgggagaactaaggatcccgttgaaagtcctgcggcagtccagctcctacgaggcgtggtacttcctccagccccgggacaatggtagcaagagcctaaagccagacgacctgggctccctgcggctgaacgtggtatacacggaagaccacgtgttttcttctgactattacagccctctgcgggacctgctgttgaagtctgcggatgtggagcccgtgtcagcgtctgcggcccacatcctgggcgaggtttgccgggagaagcaggaggcggccgtcccgctggtgcggctcttcctacactatggcagggtggtgccattcatcagtgccatcgccagcgcggaggtgaagcggacccaggaccccaacaccatcttccgaggaaactcactggcgtccaagtgcatcgacgagaccatgaagctggcggggatgcattacctgcatgtcaccctgaagcccgccatcgaggagatatgccagagccacaaaccctgtgaaatcgaccctgtgaagttgaaagacggagaaaaccttgaaaacaacatggagaacctacggcagtatgtggaccgcgtcttccacgccatcactgagtctggggtgagctgcccgaccgtcatgtgtgacatcttcttctccctccgggaggcggcggccaagcgcttccaggatgacccggacgtcaggtacactgcagtgagcagcttcatcttcctgaggttctttgcgcccgccattctctcccccaacctcttccagctcacgccgcaccacacggacccccagacgtccaggacgctgacattgatctccaagaccgttcagaccctcggcagcctgtccaagtccaaatctgcgagttttaaggagtcctacatggctacattttatgaattcttcaatgagcagaaatatgctgatgcggtgaagaacttcttggatctgatttcgtcctcggggagaagagaccccaagagtgttgagcagcccatcgtgcttaaagaagggttcatgatcaagagggcccaaggacggaagcgctttgggatgaagaattttaagaagagatggtttcgcttgaccaaccatgaatttacctaccacaaaagcaaaggggaccagcctctctacagcattcccatcgagaacatcctggcagtggagaagctggaggaggagtctttcaaaatgaaaaacatgttccaggtcatccagccagagcgtgcgctgtacatccaggccaacaactgcgtggaggccaaggactggatcgacattctcaccaaagtgagccagtgcaaccagaagcgcctcaccgtctaccacccgtccgcctacctgagcggccactggctgtgctgtagggcgccatccgactcggctccgggctgctcgccctgcactggcggcctcccagccaacatccagctggacattgatggggaccgtgagacggagcgtatctactccctcttcaacttgtacatgagcaagctggagaagatgcaggaggcctgtgggagcaaatctgtgtatgacggcccggagcaggaggagtattcgacgttcgtcattgacgacccccaggagacctacaagacgctaaagcaagtcatcgctggggttggggctttggagcaggagcacgcccagtataagagggacaagttcaagaagacgaaatatggaagccaggagcaccccatcggagacaagagcttccagaactacatccggcagcagtccgagacctccactcattccatttaa

SEQ ID NO: 645 - DNA, 1767 bp, Homo Sapiens
atgggaggccttgagaagaagaagtatgaacgaggctcggccaccaactacatcacccggaacaaagcccggaagaagctccagctgagcttggctgactttaggcggctgtgcattctgaagggcatttatccccatgaacccaaacacaagaagaaggttaacaagggttctacagcagcccgaacgttttaccttatcaaagacatcaggtttctcctccacgaacccattgtcaacaagttccgtgaatacaaggtgttcgtccggaagctccggaaggcttatgggaagagcgagtggaacactgtagagcgtttaaaggacaataagcccaactacaaactcgaccacatcatcaaggaacggtatcccacgttcatcgatgccctgcgggacctggacgatgccctctccatgtgcttcctgttttccaccttcccgcggactggcaagtgccacgtgcagaccattcagctgtgccgccggctcactgtggagttcatgcactacattatcgctgcccgtgccctgcgcaaggtcttcctgtccatcaaaggcatttactaccaggccgaggtactggggcagcccatcgtgtggatcactccctatgccttctcccatgaccacccgacagacgtggactacagggtcatggccaccttcaccgagttctacaccacgctgctgggctttgtcaacttccgcctttaccagttgctcaacctccactatcccccgaagctcgagggtcaggcccaagcagaggcaaaggccggtgagggcacctacgcgttggactccgagagttgtatggagaaactggcagccctcagtgccagcctggcccgcgtggtggtgcctgccacagaggaggaggccgaggtggatgagtttcccaccgatggggagatgtcagcgcaggaggaagaccgcaggaaggagctggaggcgcaggagaagcacaagaagctttttgagggcctgaagttcttcctgaaccgagaggtgccccgtgaggccctggccttcatcatcaggagttttggtggggaagtgtcctgggacaaatctttgtgcattggggccacctatgacgtcacagactcccgcatcacccatcagattgtcgaccggcctgggcagcagacctcagtcattggcaggtgctacgtgcagccccagtgggtgtttgactcagtgaacgccaggctccttctccccgtggcagagtacttctctggggtgcagctgcccccacacctttcaccctttgtgaccgagaaggaaggagattacgttccacctgagaagctgaagctgctggctctgcagcggggagaggacccaggaaacctgaatgagtcagaagaggaggaggaagaggacgacaacaacgaaggtgatggtgatgaagagggagaaaatgaggaggaggaggaagatgcagaggctggttcagaaaaggaggaagaggcccggctggcagccctggaagagcagaggatggaggggaagaagcccagggtgatggcaggcaccttgaagctggaggataagcagcggctggcccaggaggaggagagtgaggccaagcgcctggccattatgatgatgaagaagcgggagaagtacctgtaccagaagatcatgtttggcaagaggcgaaaaatccgagaggccaacaagctggcggagaagcggaaagcccacgatgaggcggtgaggtctgagaagaaggccaagaaggcaaggccggagtga

SEQ ID NO: 646 - DNA, 1014 bp, Homo Sapiens
atggaccaaaatgaacacagtcactggggaccacatgcaaagggccaatgtgccagcagatctgagctgagaatcatcctggtgggcaaaacaggaactggcaaaagtgctgcagggaacagcatcctcaggaagcaagcatttgaatcgaagctgggttcccagaccttgactaagacttgcagcaaaagtcagggaagctggggaaatagagagattgtcattattgacacaccagatatgttttcttggaaggaccactgtgaagctctgtacaaagaggtgcagaggtgctacttgctgtctgcaccaggaccccatgtgctgctcctggtgactcagctgggccgctatacctcacaggaccagcaggctgcacagagggtgaaggagatctttggagaggatgccatgggacacacaattgtcctctttacccacaaggaagacctcaatggtggctccctgatggattacatgcacgactcagataacaaagccctaagcaagctggtggcagcatgtggtgggcgaatctgtgcctttaataaccgtgctgaagggagcaatcaggatgaccaagtgaaggaactaatggactgtattgaggatctgttgatggagaaaaatggtgatcactataccaatgggttgtacagcctaatacagaggtctaaatgtggacctgtgggatcagatgaaagagtaaaggaattcaaacagagccttataaagtacatggaaactcaaagaagttacacagccttggctgaagcaaactgcctaaaaggagccttaatcaaaacacaactgtgtgttttattttgtattcagttgtttctcagattgataattctgtggctttgcatactgcacagcatgtgcaatttgttttgttgcttactctttagtatgtgcaatttattctgcagtttgctgtttattatacccaaaaagttaatgatatttttgagaacagttattagactagaacgcaagactcctaggttatag

SEQ ID NO: 647 - DNA, 2400 bp, Homo Sapiens
atgaagccgagtccggccgggacggcgaaggagctggagcctccggcgccggcccgaggcgagcagcgcacggcggagcccgaggggcgctggcgggagaagggcgaggcagacaccgagcggcagcgcacccgggagcggcaggaggccacgctggccgggctggcggagctggagtacctgcgccagcgccaagagctgctggtcaggggcgccctgcgcggcgccgggggtgcgggagccgctgcgccccgcgctggggagctactgggggaggcggcgcagcgcagtcgcctggaggagaagttcttggaggagaacatcttgctgctaagaaagcaattgaactgtttgaggcgaagagatgctggtttgttgaatcagttgcaagagcttgacaagcagataagtgacctgagactggatgtagaaaagacatctgaagagcacctggagacagacagtcggcctagctcagggttttatgagctgagtgatggggcttcaggatccctttccaattcctctaactcggtgttcagtgagtgtttatccagttgtcattccagcacctgcttttgcagccccttggaggcgaccttgagtctctcagatggttgccccaaatctgcagatgtgaatcccaagtaccagtgtgatctggtgtctaaaaacgggaatgatgtatatcgctatcccagtccacttcatgctgtggctgtgcagagcccaatgtttctcctttgtctgacgggcaaccctctgagggaagaggacaggcttggaaaccatgccagtgacatttgcggtggatctgagctagatgccgtcaaaacagacagttccttaccgtccccaagcagtctgtggtctgcttcccatccttcatccagcaagaaaatggatggctacattctgagcctggtccagaaaaaaacacaccctgtaaggaccaacaaaccaagaaccagcgtgaacgctgaccccacgaaagggcttctgaggaacgggagcgtttgtgtcagagccccgggcggtgtctcacagggcaacagtgtgaaccttaagaattcgaaacaggcgtgtctgccctctggcgggataccttctctgaacaatgggacattctccccaccgaagcagtggtcgaaagaatcaaaggccgaacaagccgaaagcaagagggtgcccctgccagagggctgcccctcaggcgctgcctccgaccttcagagtaagcacctgccaaaaacggccaagccagcctcgcaagaacatgctcggtgttccgccattgggacaggggagtcccctaaggaaagcgctcagctctcaggggcctctccaaaagagagtcctagcagaggccctgccccgccgcaggagaacaaagttgtacagcccctgaaaaagatgtcacagaaaaacagcctgcagggcgtccccccggccactcctcccctgctgtctacagctttccccgtggaagagaggcctgccttggatttcaagagcgagggctcttcccaaagcctggaggaagcgcacctggtcaaggcccagtttatcccggggcagcagcccagtgtcaggctccaccggggccacaggaacatgggcgtcgtgaagaactccagcctgaagcaccgcggcccagccctccaggggctggagaacggcttgcccaccgtcagggagaaaacgcgggccgggagcaagaagtgtcgcttcccagatgacttggatacaaataagaaactcaagaaagcctcctccaaggggaggaagagtgggggcgggcccgaggctggtgttcccggcaggcccgcgggcgggggccacagggcggggagcagggcgcatggccacggacgggaggcggtggtggccaaacctaagcacaagcgaactgactaccggcggtggaagtcctcggccgagatttcctacgaagaggccctgaggagggcccggcgcggtcgccgggagaatgtggggctgtaccccgcgcctgtgcctctgccctacgccagcccctacgcctacgtggctagcgactccgagtactcggccgagtgcgagtccctgttccactccaccgtggtggacaccagtgaggacgagcagagcaattacaccaccaactgcttcggggacagcgagtcgagtgtgagcgagggcgagttcgtgggggagagcacaaccaccagcgactctgaagaaagcgggggcttaatttggtcccagtttgtccagactctgcccattcaaacggtaacggccccagaccttcacaaccaccccgcaaaaacctttgtcaaaattaaggcctcacataacctcaagaagaagatcctccgctttcggtctggctctttgaaactgatgacgacggtttga

SEQ ID NO: 648 - DNA, 252 bp, Homo Sapiens
atggggcgcagaaagtcaaaacgaaagccgcctcccaagaagaagatgacaggcaccctcgagacccagttcacctgccccttctgcaaccacgagaaatcctgtgatgtgaaaatggaccgtgcccgcaacaccggagtcatctcttgtaccgtgtgcctagaggaattccagacgcccataacgtatctgtcagaacccgtggatgtgtacagtgattggatagacgcctgcgaggcggccaatcagtag

SEQ ID NO: 649 - DNA, 1023 bp, Homo Sapiens
atgagtgagcttgaccagttacggcaggaggccgagcaacttaagaaccagattcgagacgccaggaaagcatgtgcagatgcaactctctctcagatcacaaacaacatcgacccagtgggaagaatccaaatgcgcacgaggaggacactgcgggggcacctggccaagatctacgccatgcactggggcacagactccaggcttctcgtcagtgcctcgcaggatggtaaacttatcatctgggacagctacaccaccaacaaggtccacgccatccctctgcgctcctcctgggtcatgacctgtgcatatgccccttctgggaactatgtggcctgcggtggcctggataacatttgctccatttacaatctgaaaactcgtgaggggaacgtgcgcgtgagtcgtgagctggcaggacacacaggttacctgtcctgctgccgattcctggatgacaatcagatcgtcaccagctctggagacaccacgtgtgccctgtgggacatcgagaccggccagcagacgaccacgtttaccggacacactggagatgtcatgagcctttctcttgctcctgacaccagactgttcgtctctggtgcttgtgatgcttcagccaaactctgggatgtgcgagaaggcatgtgccggcagaccttcactggccacgagtctgacatcaatgccatttgcttctttccaaatggcaatgcatttgccactggctcagacgacgccacctgcaggctgtttgaccttcgtgctgaccaggagctcatgacttactcccatgacaacatcatctgcgggatcacctctgtctccttctccaagagcgggcgcctcctccttgctgggtacgacgacttcaactgcaacgtctgggatgcactcaaagccgaccgggcaggtgtcttggctgggcatgacaaccgcgtcagctgcctgggcgtgactgacgatggcatggctgtggcgacagggtcctgggatagcttcctcaagatctggaactaa

SEQ ID NO: 650 - DNA, 633 bp, Homo Sapiens
atgccgccctacaccgtggtctatttcccagttcgaggccgctgcgcggccctgcgcatgctgctggcagatcagggccagagctggaaggaggaggtggtgaccgtggagacgtggcaggagggctcactcaaagcctcctgcctatacgggcagctccccaagttccaggacggagacctcaccctgtaccagtccaataccatcctgcgtcacctgggccgcacccttgggctctatgggaaggaccagcaggaggcagccctggtggacatggtgaatgacggcgtggaggacctccgctgcaaatacatctccctcatctacaccaactatgaggcgggcaaggatgactatgtgaaggcactgcccgggcaactgaagccttttgagaccctgctgtcccagaaccagggaggcaagaccttcattgtgggagaccagatctccttcgctgactacaacctgctggacttgctgctgatccatgaggtcctagcccctggctgcctggatgcgttccccctgctctcagcatatgtggggcgcctcagtgcccggcccaagctcaaggccttcctggcctcccctgagtacgtgaacctccccatcaatggcaacgggaaacagtga

SEQ ID NO: 651 - DNA, 1302 bp, Homo Sapiens
atggcaacatcaggtgactgtcccagaagtgaatcgcagggagaagagcctgctgagtgcagtgaggccggtctcctgcaggagggagtacagccagaggagtttgtggccatcgcggactacgctgccaccgatgagacccagctcagttttttgagaggagaaaaaattcttatcctgagacaaaccactgcagattggtggtggggtgagcgtgcgggctgctgtgggtacattccggcaaaccatgtggggaagcacgtggatgagtacgaccccgaggacacgtggcaggatgaagagtacttcggcagctatggaactctgaaactccacttggagatgttggcagaccagccacgaacaactaaataccacagtgtcatcctgcagaataaagaatccctgacggataaagtcatcctggacgtgggctgtgggactgggatcatcagtctcttctgtgcacactatgcgcggcctagagcggtgtacgcggtggaggccagtgagatggcacagcacacggggcagctggtcctgcagaacggctttgctgacatcatcaccgtgtaccagcagaaggtggaggatgtggtgctgcccgagaaggtggacgtgctggtgtctgagtggatggggacctgcctgctgtttgagttcatgatcgagtccatcctgtatgcccgggatgcctggctgaaggaggacggggtcatttggcccaccatggctgcgttgcaccttgtgccctgcagtgctgataaggattatcgtagcaaggtgctcttctgggacaacgcgtacgagttcaacctcagcgctctgaaatctttagcagttaaggagtttttttcaaagcccaagtataaccacattttgaaaccagaagactgtctctctgaaccgtgcactatattgcagttggacatgagaaccgtgcaaatttctgatctagagaccctgaggggcgagctgcgcttcgacatcaggaaggcggggaccctgcacggcttcacggcctggtttagcgtccacttccagagcctgcaggaggggcagccgccgcaggtgctcagcaccgggcccttccaccccaccacacactggaagcagacgctgttcatgatggacgacccagtccctgtccatacaggagacgtggtcacgggttcagttgtgttgcagagaaacccagtgtggagaaggcacatgtctgtggctctgagctgggctgtcacttccagacaagaccccacatctcaaaaagttggagaaaaagtcttccccatctggagatga

SEQ ID NO: 652 - DNA, 2076 bp, Homo Sapiens
atggcggcaggggtcgaagcggcggcggaggtggcggcgacggagatcaaaatggaggaagagagcggcgcgcccggcgtgccgagcggcaacggggctccgggccctaagggtgaaggagaacgacctgctcagaatgagaagaggaaggagaaaaacataaaaagaggaggcaatcgctttgagccatatgccaatccaactaaaagatacagagccttcattacaaacataccttttgatgtgaaatggcagtcacttaaagacctggttaaagaaaaagttggtgaggtaacatacgtggagctcttaatggacgctgaaggaaagtcaaggggatgtgctgttgttgaattcaagatggaagagagcatgaaaaaagctgcggaagtcctaaacaagcatagtctgagcggaagaccactgaaagtcaaagaagatcctgatggtgaacatgccaggagagcaatgcaaaaggctggaagacttggaagcacagtatttgtagcaaatctggattataaagttggctggaagaaactgaaggaagtatttagtatggctggtgtggtggtccgagcagacattcttgaagataaagatggaaaaagtcgtggaataggcactgttacttttgaacagtccattgaagctgtgcaagctatatctatgttcaatggccagctgctatttgatagaccaatgcacgtcaagatggatgagagggccttaccaaaaggagatttcttccctcctgagcgtccacaacaacttccccatggccttggtggtattggcatggggttaggaccaggagggcaacccattgatgccaatcacctgaataaaggcatcggaatgggaaacataggtcccgcaggaatgggaatggaaggcataggatttggaataaataaaatgggaggaatggaggggccctttggtggtggtatggaaaacatgggtcgatttggatctgggatgaacatgggcaggataaatgaaatcctaagtaatgcactgaagagaggagagatcattgcaaagcagggaggaggtggaggtggaggaagcgtccctgggatcgagaggatgggtcctggcattgaccgcctcgggggtgccggcatggagcgcatgggcgcgggcctgggccacggcatggatcgcgtgggctccgagatcgagcgcatgggcctggtcatggaccgcatgggctccgtggagcgcatgggctccggcattgagcgcatgggcccgctgggcctcgaccacatggcctccagcattgagcgcatgggccagaccatggagcgcattggctctggcgtggagcgcatgggtgccggcatgggcttcggccttgagcgcatggccgctcccatcgaccgtgtgggccagaccattgagcgcatgggctctggcgtggagcgcatgggccctgccatcgagcgcatgggcctgagcatggagcgcatggtgcccgcaggtatgggagctggcctggagcgcatgggccccgtgatggatcgcatggccaccggcctggagcgcatgggcgccaacaatctggagcggatgggcctggagcgcatgggcgccaacagcctcgagcgcatgggcctggagcgcatgggtgccaacagcctcgagcgcatgggccctgccatgggcccggccctgggcgctggcattgagcgcatgggcctggccatgggtggcggtggcggtgccagctttgaccgtgccatcgagatggagcgtggcaacttcggaggaagcttcgcaggttcctttggtggagctggaggccatgctcctggggtggccaggaaggcctgccagatatttgtgagaaatctgccattcgatttcacatggaagatgctaaaggacaaattcaacgagtgcggccacgtgctgtacgccgacatcaagatggagaatgggaagtccaaggggtgtggcgtggttaagttcgagtcgccagaggtggccgagagagcctgccggatgatgaatggcatgaagctgagtggccgagagattgacgttcgaattgatagaaacgcttaa

SEQ ID NO: 653 - DNA, 2451 bp, Homo Sapiens
atggagtctcgggtcttactgagaacattctgtttgatcttcggtctcggagcagtttgggggcttggtgtggacccttccctacagattgacgtcttaacagagttagaacttggggagtccacgaccggagtgcgtcaggtcccggggctgcataatgggacgaaagcctttctctttcaagatactcccagaagcataaaagcatccactgctacagctgaacagttttttcagaagctgagaaataaacatgaatttactattttggtgaccctaaaacagacccacttaaattcaggagttattctctcaattcaccacttggatcacaggtacctggaactggaaagtagtggccatcggaatgaagtcagactgcattaccgctcaggcagtcaccgccctcacacagaagtgtttccttacattttggctgatgacaagtggcacaagctctccttagccatcagtgcttcccatttgattttacacattgactgcaataaaatttatgaaagggtagtagaaaagccctccacagacttgcctctaggcacaacattttggctaggacagagaaataatgcgcatggatattttaagggtataatgcaagatgtccaattacttgtcatgccccagggatttattgctcagtgcccagatcttaatcgcacctgtccaacttgcaatgacttccatggacttgtgcagaaaatcatggagctacaggatattttagccaaaacatcagccaagctgtctcgagctgaacagcgaatgaatagattggatcagtgctattgtgaaaggacttgcaccatgaagggaaccacctaccgagaatttgagtcctggatagacggctgtaagaactgcacatgcctgaatggaaccatccagtgtgaaactctaatctgcccaaatcctgactgcccacttaagtcggctcttgcgtatgtggatggcaaatgctgtaaggaatgcaaatcgatatgccaatttcaaggacgaacctactttgaaggagaaagaaatacagtctattcctcttctggagtatgtgttctctatgagtgcaaggaccagaccatgaaacttgttgagagttcaggctgtccagctttggattgtccagagtctcatcagataaccttgtctcacagctgttgcaaagtttgtaaaggttatgacttttgttctgaaaggcataactgcatggagaattccatctgcagaaatctgaatgacagggctgtttgtagctgtcgagatggttttagggctcttcgagaggataatgcctactgtgaagacatcgatgagtgtgctgaagggcgccattactgtcgtgaaaatacaatgtgtgtcaacaccccgggttcttttatgtgcatctgcaaaactggatacatcagaattgatgattattcatgtacagaacatgatgagtgtatcacaaatcagcacaactgtgatgaaaatgctttatgcttcaacactgttggaggacacaactgtgtttgcaagccgggctatacagggaatggaacgacatgcaaagcattttgcaaagatggctgtaggaatggaggagcctgtattgccgctaatgtgtgtgcctgcccacaaggcttcactggacccagctgtgaaacggacattgatgaatgctctgatggttttgttcaatgtgacagtcgtgctaattgcattaacctgcctggatggtaccactgtgagtgcagagatggctaccatgacaatgggatgttttcaccaagtggagaatcgtgtgaagatattgatgagtgtgggaccgggaggcacagctgtgccaatgataccatttgcttcaatttggatggcggatatgattgtcgatgtcctcatggaaagaattgcacaggggactgcatccatgatggaaaagttaagcacaatggtcagatttgggtgttggaaaatgacaggtgctctgtgtgctcatgtcagaatggattcgttatgtgtcgacggatggtctgtgactgtgagaatcccacagttgatcttttttgctgccctgaatgtgacccaaggcttagtagtcagtgcctccatcaaaatggggaaactttgtataacagtggtgacacctgggtccagaattgtcaacagtgccgctgcttgcaaggggaagttgattgttggcccctgccttgcccagatgtggagtgtgaattcagcattctcccagagaatgagtgctgcccgcgctgtgtcacagacccttgccaggctgacaccatccgcaatgacatcaccaagacttgcctggacgaaatgaatgtggttcgcttcaccgggtcctcttggatcaaacatggcactgagtgtactctctgccagtgcaagaatggccacatctgttgctcagtggatccacagtgccttcaggaactgtga

SEQ ID NO: 654 - DNA, 1206 bp, Homo Sapiens
atgtcttccaaaatcattggaataaatggtgatttctttgctaacatggtagtagatgctgtacttgctattaaatacacagacataagaggccagccacgctatccagtcaactctgttaatattttgaaagcccatgggagaagtcaaatggagagtatgctcatcagtggctatgcactcaactgtgtggtgggatcccagggcatgcccaagagaatcgtaaatgcaaaaattgcttgccttgacttcagcctgcaaaaaacaaaaatgaagcttggtgtacaggtggtcattacagaccctgaaaaactggaccaaattagacagagagaatcagatatcaccaaggagagaattcagaagatcctggcaactggtgccaatgttattctaaccactggtggaattgatgatatgtgtctgaagtattttgtggaggctggtgctatggcagttagaagagttttaaaaagggaccttaaacgcattgccaaagcttctggagcaactattctgtcaaccctggccaatttggaaggtgaagaaacttttgaagctgcaatgttgggacaggcagaagaagtggtacaggagagaatttgtgatgatgagctgatcttaatcaaaaatactaaggctcgtacgtctgcatcgattatcttacgtggggcaaatgatttcatgtgtgatgagatggagcgctctttacatgatgcactttgtgtagtgaagagagttttggagtcaaaatctgtggttcccggtgggggtgctgtagaagcagccctttccatataccttgaaaactatgcaaccagcatggggtctcgggaacagcttgcgattgcagagtttgcaagatcacttcttgttattcccaatacactagcagttaatgctgcccaggactccacagatctggttgcaaaattaagagcttttcataatgaggcccaggttaacccagaacgtaaaaatctaaaatggattggtcttgatttgagcaatggtaaacctcgagacaacaaacaagcaggggtgtttgaaccaaccatagttaaagttaagagtttgaaatttgcaacagaagctgcaatcaccattcttcgaattgatgatcttattaaattacatccagaaagtaaagatgataaacatggaagttatgaagatgctgttcactctggagcccttaatgattga

SEQ ID NO: 655 - DNA, 1035 bp, Homo Sapiens
atgggcttcaacctgactttccacctttcctacaaattccgattactgttgctgttgactttgtgcctgacagtggttgggtgggccaccagtaactacttcgtgggtgccattcaagagattcctaaagcaaaggagttcatggctaatttccataagaccctcattttggggaagggaaaaactctgactaatgaagcatccacgaagaaggtagaacttgacaactgcccttctgtgtctccttacctcagaggccagagcaagctcattttcaaaccagatctcactttggaagaggtacaggcagaaaatcccaaagtgtccagaggccggtatcgccctcaggaatgtaaagctttacagagggtcgccatcctcgttccccaccggaacagagagaaacacctgatgtacctgctggaacatctgcatcccttcctgcagaggcagcagctggattatggcatctacgtcatccaccaggctgaaggtaaaaagtttaatcgagccaaactcttgaatgtgggctatctagaagccctcaaggaagaaaattgggactgctttatattccacgatgtggacctggtacccgagaatgactttaacctttacaagtgtgaggagcatcccaagcatctggtggttggcaggaacagcactgggtacaggttacgttacagtggatattttgggggtgttactgccctaagcagagagcagtttttcaaggtgaatggattctctaacaactactggggatggggaggcgaagacgatgacctcagactcagggttgagctccaaagaatgaaaatttcccggcccctgcctgaagtgggtaaatatacaatggtcttccacactagagacaaaggcaatgaggtgaacgcagaacggatgaagctcttacaccaagtgtcacgagtctggagaacagatgggttgagtagttgttcttataaattagtatctgtggaacacaatcctttatatatcaacatcacagtggatttctggtttggtgcatga

SEQ ID NO: 656 - DNA, 816 bp, Homo Sapiens
atggcgggcctggaggtactgttcgcatcggcagcgccggccatcacctgcaggcaggacgcgctcgtctgcttcttgcattgggaagtggtgacacacggttacttcggcttgggtgtcggtgaccagccgggtcccaatgataagaagtcagaactgctgccagctgggtggaacaacaataaagacctgtatgtcctccggtatgagtataaggatgggtccagaaagctccttgtgaaagccatcaccgtggagagcagcatgatcctcaatgtgctggaatatggctcacagcaagtggcagacttgaccctgaacttggatgattatatcgatgcagaacacctgggtgacttccacaggacctacaagaacagtgaggagcttcggtctcgtattgtgtctggaatcatcacacctatccatgagcagtgggaaaaggctaatgtaagcagtccccaccgggagttcccccctgctaccgccagagaggtggacccactccggattcctccacaccacccacacaccagtcggcagcctccctggtgtgatcccctgggcccgtttgttgtcgggggagaagacttagacccttttgggcctcggagaggtggcatgattgtggatcccctgagatctggcttcccaagagcacttattgacccttcctcaggcctcccgaaccgacttcctccaggcgctgtgcccccaggagctcgctttgacccctttggacccattgggaccagcccacccggacctaacccagaccatctccccccgccgggctacgatgacatgtacctgtga

SEQ ID NO: 657 - DNA, 3684 bp, Homo Sapiens
atgggggacaccagtgaggatgcctcgatccatcgattggaaggcactgatctggactgtcaggttggtggtcttatttgcaagtccaaaagtgcggccagcgagcagcatgtcttcaaggctcctgctccccgcccttcattactcggactggacttgctggcttccctgaaacggagagagcgagaggagaaggacgatggggaggacaagaagaagtccaaagtctcctcctacaaggactgggaagagagcaaggatgaccagaaggatgctgaggaagagggcggtgaccaggctggccaaaatatccggaaagacagacattatcggtctgctcgggtagagactccatcccatccgggtggtgtgagcgaagagttttgggaacgcagtcggcagagagagcgggagcggcgggaacatggtgtctatgcctcgtccaaagaagaaaaggattggaagaaggagaaatcgcgggatcgagactatgaccgcaagagggacagagatgagcgggatagaagtaggcacagcagcagatcagagcgagatggagggtcagagcgtagcagcagaagaaatgaacccgagagcccacgacatcgacctaaagatgcagccaccccttcaaggtctacctgggaggaagaggacagtggctatggctcctcaaggcgctcacagtgggaatcgccctccccgacgccttcctatcgggattctgagcggagccatcggctgtccactcgagatcgagacaggtctgtgaggggcaagtactcggatgacacgcctctgccaactccctcctacaaatataacgagtgggccgatgacagaagacacttggggtccaccccgcgtctgtccaggggccgaggaagacgtgaggagggcgaagaaggaatttcatttgacacggaggaggagcggcagcagtgggaagatgaccagaggcaagccgatcgggattggtacatgatggacgagggctatgacgagttccacaacccgctggcctactcctccgaggactacgtgaggaggcgggagcagcacctgcataaacagaagcagaagcgcatttcagctcagcggagacagatcaatgaggataacgagcgctgggagacaaaccgcatgctcaccagtggggtggtccatcggctggaggtggatgaggactttgaagaggacaacgcggccaaggtgcatctgatggtgcacaatctggtgcctccctttctggatgggcgcattgtcttcaccaagcagccggagccggtgattccagtgaaggatgctacttctgacctggccatcattgctcggaaaggcagccagacagtgcggaagcacagggagcagaaggagcgcaagaaggctcagcacaaacactgggaactggcggggaccaaactgggagatataatgggcgtcaagaaggaggaagagccagataaagctgtgacggaggatgggaaggtggactacaggacagagcagaagtttgcagatcacatgaagagaaagagcgaagccagcagtgaatttgcaaagaagaagtccatcctggagcagaggcagtacctgcccatctttgcagtgcagcaggagctgctcactattatcagagacaacagcatcgtgatcgtggttggggagacggggagtggtaagaccactcagctgacgcagtacctgcatgaagatggttacacggactatgggatgattgggtgtacccagccccggcgtgtagctgccatgtcagtggccaagagagtcagtgaagagatggggggaaaccttggcgaggaggtgggctatgccatccgctttgaagactgcacttcagagaacaccttgatcaaatacatgactgacgggatcctgctccgagagtccctccgggaagccgacctggatcactacagtgccatcatcatggacgaggcccacgagcgctccctcaacactgacgtgctctttgggctgctccgggaggtagtggctcggcgctcagacctgaagctcatcgtcacatcagccacgatggatgcggagaagtttgctgccttttttgggaatgtccccatcttccacatccctggccgtaccttccctgttgacatcctcttcagcaagaccccacaggaggattacgtggaggctgcagtgaagcagtccttgcaggtgcacctgtcgggggcccctggagacatccttatcttcatgcctggccaagaggacattgaggtgacctcagaccagattgtggagcatctggaggaactggagaacgcgcctgccctggctgtgctgcccatctactctcagctgccttctgacctccaggccaaaatcttccagaaggctccagatggcgttcggaagtgcatcgttgccaccaatattgccgagacgtctctcactgttgacggcatcatgtttgttatcgattctggttattgcaaattaaaggtcttcaaccccaggattggcatggatgctctgcagatctatcccattagccaggccaatgccaaccagcggtcagggcgagccggcaggacgggcccaggtcagtgtttcaggctctacacccagagcgcctacaagaatgagctcctgaccaccacagtgcccgagatccagaggactaacctggccaacgtggtgctgctgctcaagtccctcggggtgcaggacctgctgcagttccacttcatggacccgcccccggaggacaacatgctcaactctatgtatcagctctggatcctcggggccctggacaacacaggtggtctgacctctaccgggcggctgatggtggagttcccgctggaccctgccctgtccaagatgctcatcgtgtcctgtgacatgggctgcagctccgagatcctgctcatcgtttccatgctctcggtcccagccatcttctacaggcccaagggtcgagaggaggagagtgatcaaatccgggagaagttcgctgttcctgagagcgatcatttgacctacctgaatgtttacctgcagtggaagaacaataattactccaccatctggtgtaacgatcatttcatccatgctaaggccatgcggaaggtccgggaggtgcgagctcaactcaaggacatcatggtgcagcagcggatgagcctggcctcgtgtggcactgactgggacatcgtcaggaagtgcatctgtgctgcctatttccaccaagcagccaagctcaagggaatcggggagtacgtgaacatccgcacagggatgccctgccacttgcaccccaccagctccctttttggaatgggctacaccccagattacatagtgtatcacgagttggtcatgaccaccaaggagtatatgcagtgtgtgaccgctgtggacggggagtggctggcggagctgggccccatgttctatagcgtgaaacaggcgggcaagtcacggcaggagaaccgtcgtcgggccaaagaggaagcctctgccatggaggaggagatggcgctggccgaggagcagctgcgagcccggcggcaggagcaggagaagcgcagccccctgggcagtgtcaggtctacgaagatctacactccaggccggaaagagcaaggggagcccatgacccctcgccgcacgccagcccgctttggtctgtga

SEQ ID NO: 658 - DNA, 1206 bp, Homo Sapiens
atggagccggggcgccggggggccgcggcgctgctagcgctgctgtgcgtggcctgcgcgctgcgcgccgggcgcgcccaatacgaacgctacagcttccgcagcttcccacgggacgagctgatgccgctcgagtcggcctaccggcacgcgctggacaagtacagcggcgagcactgggccgagagcgtgggctacctggagatcagcctgcggctgcaccgcttgctgcgcgacagcgaggccttctgccaccgcaactgcagcgccgcgccgcagcccgagcccgccgccggcctcgccagctatcccgagctgcgcctcttcgggggcctgctgcgccgcgcgcactgcctcaagcgctgcaagcagggcctgccagccttccgccagtcccagcccagccgcgaggtgctggcggacttccagcgccgcgagccctacaagttcctgcagttcgcttacttcaaggcaaataatctccccaaagccatcgccgctgctcacacctttctactgaagcatcctgatgacgaaatgatgaagaggaacatggcatattataagagcctgcctggtgccgaggactacattaaagacctggaaaccaagtcatatgaaagcctgttcatccgagcagtgcgggcatacaacggtgagaactggagaacatccatcacagacatggagctggcccttcccgacttcttcaaagccttttacgagtgtctcgcagcctgcgagggttccagggagatcaaggacttcaaggatttctacctttccatagcagatcattatgtagaagttctggaatgcaaaatacagtgtgaagagaacctcaccccagttataggaggctatccggttgagaaatttgtggctaccatgtatcattacttgcagtttgcctattataagttgaacgacctgaagaatgcagccccctgtgcagtcagctatctgctctttgatcagaatgacaaggtcatgcagcagaacctggtgtattaccagtaccacagggacacttggggcctctcggatgagcacttccagcccagacctgaagcagttcagttctttaatgtgaccacactccagaaggagctgtatgactttgctaaggaaaatataatggatgatgatgagggagaagttgtggaatatgtggatgacctcttggaactggaggagaccagctag

SEQ ID NO: 659 - DNA, 2826 bp, Homo Sapiens
atgaacaagaagaagaaaccgttcctagggatgcccgcgcccctcggctacgtgccggggctgggccggggcgccactggcttcaccacgcggtcagacattgggcccgcccgtgatgcaaatgaccctgtggatgatcgccatgcacccccaggcaagagaaccgttggggaccagatgaagaaaaatcaggctgctgacgatgacgacgaggatctaaatgacaccaattacgatgagtttaatggctatgctgggagcctcttctcaagtggaccctacgagaaagatgatgaggaagcagatgctatctatgcagccctggataaaaggatggatgaaagaagaaaagaaagacgggagcaaagggagaaagaagaaatagagaaatatcgtatggaacgccccaaaatccaacagcagttctcagacctcaagaggaagttggcagaagtcacagaagaagagtggctgagcatccccgaggttggcgatgccagaaataaacgtcagcggaacccacgctatgagaagctgacccctgttcctgacagtttctttgccaaacatttacagaccggagagaaccatacctcagtggatccccgacaaactcaatttggaggtcttaacacaccctatccaggtggactaaacactccatacccaggtggaatgacgccaggactgatgacacctggcacaggtgagctggacatgaggaagattggccaagcgaggaacactctgatggacatgaggctgagccaggtgtctgactccgtgagtggacagaccgtcgttgaccccaaaggctacctgacggatttaaattccatgatcccgacacacggaggagacatcaatgatatcaagaaggcgcgactgctcctcaagtctgttcgggagacgaaccctcatcacccgccagcctggattgcatcagcccgcctggaagaagtcactgggaagctacaagtagctcggaaccttatcatgaaggggacggagatgtgccccaagagtgaagatgtctggctggaagcagccaggttgcagcctggggacacagccaaggccgtggtagcccaagctgtccgtcatctcccacagtctgtcaggatttacatcagagccgcagagctggaaacggacattcgtgcaaagaagcgggttcttcggaaagccctcgagcatgttccaaactcggttcgcttgtggaaagcagccgttgagctggaagaacctgaagatgctagaatcatgctgagccgagctgtggagtgctgccccaccagcgtggagctctggcttgctctggcaaggctggagacctatgaaaatgcccgcaaggtcttgaacaaggcgcgggagaacattcctacagaccgacatatctggatcacggctgctaagctggaggaagccaatgggaacacgcagatggtggagaagatcatcgaccgagccatcacctcgctgcgggccaacggtgtggagatcaaccgtgagcagtggatccaggatgccgaggaatgtgacagggctgggagtgtggccacctgccaggccgtcatgcgtgccgtgattgggattgggattgaggaggaagatcggaagcatacctggatggaggatgctgacagttgtgtagcccacaatgccctggagtgtgcacgagccatctacgcctacgccctgcaggtgttccccagcaagaagagtgtgtggctgcgcgccgcgtacttcgagaagaaccatggcactcgggagtccctggaagcactcctgcagagggctgtggcccactgccccaaagcagaggtgctgtggctcatgggcgccaagtccaagtggctggcaggggatgtgcctgcagcaaggagcatcctggccctggccttccaggccaaccccaacagtgaggagatctggctggcagccgtgaagctggagtccgagaatgatgagtacgagcgggcccggaggctgctggccaaggcgcggagcagtgcccccaccgcccgggtgttcatgaagtctgtgaagctggagtgggtgcaagacaacatcagggcagcccaagatctgtgcgaggaggccctgcggcactatgaggacttccccaagctgtggatgatgaaggggcagatcgaggagcagaaggagatgatggagaaggcgcgggaagcctataaccaggggttgaagaagtgtccccactccacacccctgtggcttttgctctctcggctggaggagaagattgggcagcttactcgagcacgggccattttggaaaagtctcgtctgaagaacccaaagaaccctgggctgtggttggagtccgtgcggctggagtaccgtgcggggctgaagaacatcgcaaatacactcatggccaaggcgctgcaggagtgccccaactccggtatcctgtggtctgaggccatcttcctcgaggcaaggccccagaggaggaccaagagcgtggatgccctgaagaagtgtgagcatgacccccatgtgctcctggccgtggccaagctgttttggagtcagcggaagatcaccaaggccagggagtggttccaccgcactgtgaagattgactcggacctgggggatgcctgggccttcttctacaagtttgagctgcagcatggcactgaggagcagcaggaggaggtgaggaagcgctgtgagagtgcagagcctcggcatggggagctgtggtgcgccgtgtccaaggacatcgccaactggcagaagaagatcggggacatccttaggctggtggccggccgcatcaagaacaccttctga

SEQ ID NO: 660 - DNA, 822 bp, Homo Sapiens
atggatcccgtacccgggacagactcggcgccgctggctggcctggcctggtcgtcggcctctgcacccccgccgcgggggttcagcgcgatctcctgcaccgtcgagggggcacccgccagctttggcaagagcttcgcgcagaaatctggctacttcctgtgccttagttctctgggcagcctagagaacccgcaggagaacgtggtggccgatatccagatcgtggtggacaagagccccctgccgctgggcttctcccccgtctgcgaccccatggattccaaggcctctgtgtccaagaagaaacgcatgtgtgtgaagctgttgcccctgggagccacggacacggctgtgtttgatgtccggctgagtgggaagaccaagacagtgcctggataccttcgaataggggacatgggcggctttgccatctggtgcaagaaggccaaggccccgaggccagtgcccaagccccgaggtctcagccgggacatgcagggcctctctctggatgcagccagccagccaagtaagggcggcctcctggagcggacagcgtcaaggctgggctctcgggcatccactctgcggaggaatgactccatctacgaggcctccagcctctatggcatctcagccatggatggggttcccttcacactccacccacgatttgagggcaagagctgcagccccctggccttctctgcttttggggacctgaccatcaagtctctggcggacattgaggaggagtataactacggcttcgtggtggagaagaccgcggctgcccgcctgccccccagcgtctcatag

SEQ ID NO: 661 - DNA, 675 bp, Homo Sapiens
atgtcggtgttcgggaagctgttcggggctggagggggtaaggccggcaagggcggcccgaccccccaggaggccatccagcggctgcgggacacggaagagatgttaagcaagaaacaggagttcctggagaagaaaatcgagcaggagctgacggccgccaagaagcacggcaccaaaaacaagcgcgcggccctccaggcactgaagcgtaagaagaggtatgagaagcagctggcgcagatcgacggcacattatcaaccatcgagttccagcgggaggccctggagaatgccaacaccaacaccgaggtgctcaagaacatgggctatgccgccaaggccatgaaggcggcccatgacaacatggacatcgataaagttgatgagttaatgcaggacattgctgaccagcaagaacttgcagaggagatttcaacagcaatttcgaaacctgtagggtttggagaagagtttgacgaggatgagctcatggcggaattagaagaactagaacaggaggaactagacaagaatttgctggaaatcagtggacccgaaacagtccctctaccaaatgttccctctatagccctaccatcaaaacccgccaagaagaaagaagaggaggacgacgacatgaaggaattggagaactgggctggatccatgtaa

SEQ ID NO: 662 - DNA, 831 bp, Homo Sapiens
atggacgccgacagcctcctgctgtctctggagctggcgtccggcagtgggcagggcctcagcccggaccgtcgggcctcgctgctcacgtctcttatgctggttaagcgcgactaccgctatgatcgggttctcttctggggccgcatccttggcctcgtcgccgattactacatcgcgcagggcctgagtgaggaccagctcgcaccgcgcaagacgctctatagcctgaactgcacagagtggagcctcttgccccctgccacagaggagatggtggcgcagtcgtctgtggtgaagggccgcttcatgggggacccatcatacgaatatgaacacactgagctgcagaaggtgaatgaaggtgaaaaagtctttgaagaagaaatagtggtccagatcaaggaagagacccgcttggtgtctgtcattgaccagattgacaaggctgtggccatcatcccccgaggcgccctcttcaagaccccttttggacccacccatgtcaatcggacctttgaaggactgtccttgtctgaggccaagaagctcagctcctacttccatttcagggagcctgttgagctaaagaataagaccttgcttgagaaggctgacctggacccctccctggatttcatggactccttggagcatgacattcccaaagggtcctggagcatccagatggagaggggcaatgccctggtggtgctgcgcagcctgctctggccgggcctcaccttctaccatgctccccgcaccaagaactatggctacgtctacgtgggcactggcgagaagaacatggacttgcccttcatgctatag

SEQ ID NO: 663 - DNA, 414 bp, Homo Sapiens
atgggatggttgaggccggggccacgccccctctgcccccctgcgagggcatcctgggctttctcccaccgctttccgagcccgcttgcacctcggcgatccccgactcccttctttatggcgtcgctcctgtgctgtgggccgaagctggccgcctgcggcatcgtcctcagcgcctggggagtgatcatgttgataatgctcggaatatttttcaatgtccattccgctgtgttgattgaggacgttcccttcacggagaaagattttgagaatggcccccagaacatatacaacctttacgagcaagtcagctacaactgtttcatcgctgcaggcctttacctcctcctcggaggcttctctttctgccaagttcggctcaataagcgcaaggaatacatggtgcgctag

SEQ ID NO: 664 - DNA, 1968 bp, Homo Sapiens
atgcaggcggctcggatggccgcgagcttggggcggcagctgctgaggctcgggggcggaagctcgcggctcacggcgctcctggggcagccccggcccggccctgcccggcggccctatgccgggggtgccgctcagctggctctggacaagtcagattcccacccctctgacgctctgaccaggaaaaaaccggccaaggcggaatctaagtcctttgctgtgggaatgttcaaaggccagctcaccacagatcaggtgttcccatacccgtccgtgctcaacgaagagcagacacagtttcttaaagagctggtggagcctgtgtcccgtttcttcgaggaagtgaacgatcccgccaagaatgacgctctggagatggtggaggagaccacttggcagggcctcaaggagctgggggcctttggtctgcaagtgcccagtgagctgggtggtgtgggcctttgcaacacccagtacgcccgtttggtggagatcgtgggcatgcatgaccttggcgtgggcattaccctgggggcccatcagagcatcggtttcaaaggcatcctgctctttggcacaaaggcccagaaagaaaaatacctccccaagctggcatctggggagactgtggccgctttctgtctaaccgagccctcaagcgggtcagatgcagcctccatccgaacctctgctgtgcccagcccctgtggaaaatactataccctcaatggaagcaagctttggatcagtaatgggggcctagcagacatcttcacggtctttgccaagacaccagttacagatccagccacaggagccgtgaaggagaagatcacagcttttgtggtggagaggggcttcgggggcattacccatgggccccctgagaagaagatgggcatcaaggcttcaaacacagcagaggtgttctttgatggagtacgggtgccatcggagaacgtgctgggtgaggttgggagtggcttcaaggttgccatgcacatcctcaacaatggaaggtttggcatggctgcggccctggcaggtaccatgagaggcatcattgctaaggcggtagatcatgccactaatcgtacccagtttggggagaaaattcacaactttgggctgatccaggagaagctggcacggatggttatgctgcagtatgtaactgagtccatggcttacatggtgagtgctaacatggaccagggagccacggacttccagatagaggccgccatcagcaaaatctttggctcggaggcagcctggaaggtgacagatgaatgcatccaaatcatggggggtatgggcttcatgaaggaacctggagtagagcgtgtgctccgagatcttcgcatcttccggatctttgaggggacaaatgacattcttcggctgtttgtggctctgcagggctgtatggacaaaggaaaggagctctctgggcttggcagtgctctaaagaatccctttgggaatgctggcctcctgctaggagaggcaggcaaacagctgaggcggcgggcagggctgggcagcggcctgagtctcagcggacttgtccacccggagttgagtcggagtggcgagctggcagtacgggctctggagcagtttgccactgtggtggaggccaagctgataaaacacaagaaggggattgtcaatgaacagtttctgctgcagcggctggcagacggggccatcgacctctatgccatggtggtggttctctcgagggcctcaagatccctgagtgagggccaccccacggcccagcatgagaaaatgctctgtgacacctggtgtatcgaggctgcagctcggatccgagagggcatggccgccctgcagtctgacccctggcagcaagagctctaccgcaacttcaaaagcatctccaaggccttggtggagcggggtggtgtggtcaccagcaacccacttggcttctga

SEQ ID NO: 665 - DNA, 1818 bp, Homo Sapiens
atgaaggcttccagccgcttcaaggcacaccaggatgcactgccacggctgcccgtgccccctctccagcagtccctggaccactacctgaaggcgctgcagcccatcgtgagtgaggaggagtgggcccacaccaagcagctggtggatgagtttcaggcctcaggaggtgtaggggagcgcctgcagaaggggctggagcgtcgggccaggaagacggagaactggctgtctgagtggtggctcaagaccgcctacctccagtaccgccagcctgtggtcatctactcgagcccaggcgtgatgctacccaagcaggacttcgtggacctgcagggtcagctccgatttgctgccaaactcattgagggtgtgttggatttcaaggtcatgattgacaacgagaccctgcccgtggagtacctgggggggaagccactgtgcatgaaccagtactatcagatcttgtcctcctgccgagtgccgggccccaagcaggacacagtcagcaacttcagcaagaccaagaagcctcccacgcacatcaccgtggtacacaactaccagttttttgagctggatgtgtaccacagtgacgggacacccctcactgcggatcagatctttgtgcagctggagaagatctggaactcatccctacagaccaacaaggagcctgtgggcatcctcacctccaaccaccgcaactcctgggccaaggcatacaacaccctcatcaaagacaaggtgaaccgggattccgtgcgctccatccagaagagcatcttcaccgtgtgcctagatgcaaccatgcccagggtctcagaagacgtgtaccgcagccacgtggcaggccagatgctgcatgggggcggcagcaggctcaacagcggcaaccgctggttcgacaagacgctgcagttcatcgtggcagaagatggctcctgtgggcttgtgtacgagcatgctgcagcggaggggccccctattgtcacccttctggactatgtcatcgagtacacgaagaaacccgagcttgtgcggtctcccatggtgcccctgcccatgcccaagaagctgcggttcaacatcacccccgagatcaagagcgacatcgagaaggccaagcagaacctcagcatcatgatccaggacctggatatcaccgtgatggtgttccaccattttggaaaagacttccccaagtcggagaagctaagcccagatgccttcatccagatggctttgcagctggcctactacaggatctacggacaggcatgtgccacctatgaaagtgcctccctgcgcatgtttcacctgggccgcaccgacaccatccgctcggcttccatggactcactcacctttgtcaaggccatggatgactccagcgtcacggagcaccagaaggtggagctgctgcggaaggccgtgcaggcccaccgaggctacaccgaccgggccatccgcggggaggcctttgatcgacacctgctgggcctgaagctgcaggccatcgaggacctggtgagcatgcccgacatcttcatggacacctcctacgccatcgccatgcacttccacctctccaccagccaggtccctgccaagacagactgtgtcatgttcttcgggcccgtggtccccgacggctacggtgtctgctataaccccatggaggcccacatcaacttctccctgtcggcctacaacagctgcgcggagaccaacgccgcccgcctggcgcattacctggagaaggcgctcctggacatgcgtgccctgctgcagagccacccccgggccaagctctga

SEQ ID NO: 666 - DNA, 981 bp, Homo Sapiens
atgtctaatggttatgaagaccacatggccgaagactgcaggggtgacatcgggagaacgaatttgatcgtcaactacctccctcagaacatgacccaggatgagttacgaagcctgttcagcagcattggtgaagttgaatctgcaaaacttattcgggataaagtagcaggacacagcttgggctatggctttgtgaactacgtgaccgcgaaggatgcagagagagcgatcaacacgctgaacggcttgaggctccagtcaaaaaccattaaggtgtcgtatgctcgcccgagctcagaggtgatcaaagacgccaacttgtacatcagcgggctcccgcggaccatgacccagaaggacgtagaagacatgttctctcggtttgggcggatcatcaactcgcgggtcctcgtggatcagactacaggtttgtccagaggggttgcgtttatccggtttgacaaacggtcggaggcagaagaggcaattaccagtttcaatggtcataaacccccaggttcctctgagcccatcacagtgaagtttgcagccaaccccaaccagaacaaaaacgtggcactcctctcgcagctgtaccactcgccagcgcgacggttcggaggccccgttcaccaccaggcgcagagattcaggttctcccccatgggcgtcgatcacatgagcgggctctctggcgtcaacgtgccaggaaacgcctcctccggctggtgcattttcatctacaacctggggcaggatgccgacgaggggatcctctggcagatgtttgggccgtttggtgccgtcaccaatgtgaaagtgatccgcgacttcaacaccaacaagtgcaaagggtttggctttgtgaccatgacaaactatgaagaagccgcgatggccatagccagcctgaacggctaccgcctgggggacaaaatcttacaggtttccttcaaaaccaacaagtcccacaaataa

SEQ ID NO: 667 - DNA, 714 bp, Homo Sapiens
atggcggctgtgagggccctggtggcctcgaggctcgctgcggcatctgcattcacgtccctgtcccccggcggtcggacgccttcccagcgcgcagcccttcacctctccgtgccgcgccccgcggccagggtcgcgctggtgctgtctggatgcggagtctacgatgggaccgagatccacgaggcctcggcgatcctggtgcacctgagccgtggaggggctgaagtccagatctttgctcctgacgtccctcagatgcacgtgattgaccacaccaaggggcagccgtccgaaggcgagagcaggaatgttttgaccgagtctgcgaggatcgcccgtggcaaaatcacagacctggccaacctcagtgcagccaaccatgatgctgccatctttccaggaggctttggagcggctaaaaacctcttgtgctgcattgcacctgtcctcgcggccaaggtgctcagaggcgtcgaggtgactgtgggccacgagcaggaggaaggtggcaagtggccttatgccgggaccgcagaggccatcaaggccctgggtgccaagcactgcgtgaaggaagtggtcgaagctcacgtggaccagaaaaacaaggtggtcacgaccccagccttcatgtgcgagacggcactccactacatccatgatgggatcggagccatggtgaggaaggtgctggaactcactggaaagtga

SEQ ID NO: 668 - DNA, 1875 bp, Homo Sapiens
atgcagccagatcccaggcctagcggggctggggcctgctgccgattcctgcccctgcagtcacagtgccctgagggggcaggggacgcggtgatgtacgcctccactgagtgcaaggcggaggtgacgccctcccagcatggcaaccgcaccttcagctacaccctggaggatcataccaagcaggcctttggcatcatgaacgagctgcggctcagccagcagctgtgtgacgtcacactgcaggtcaagtaccaggatgcaccggccgcccagttcatggcccacaaggtggtgctggcctcatccagccctgtcttcaaggccatgttcaccaacgggctgcgggagcagggcatggaggtggtgtccattgagggtatccaccccaaggtcatggagcgcctcattgaattcgcctacacggcctccatctccatgggcgagaagtgtgtcctccacgtcatgaacggtgctgtcatgtaccagatcgacagcgttgtccgtgcctgcagtgacttcctggtgcagcagctggaccccagcaatgccatcggcatcgccaacttcgctgagcagattggctgtgtggagttgcaccagcgtgcccgggagtacatctacatgcattttggggaggtggccaagcaagaggagttcttcaacctgtcccactgccaactggtgaccctcatcagccgggacgacctgaacgtgcgctgcgagtccgaggtcttccacgcctgcatcaactgggtcaagtacgactgcgaacagcgacggttctacgtccaggcgctgctgcgggccgtgcgctgccactcgttgacgccgaacttcctgcagatgcagctgcagaagtgcgagatcctgcagtccgactcccgctgcaaggactacctggtcaagatcttcgaggagctcaccctgcacaagcccacgcaggtgatgccctgccgggcgcccaaggtgggccgcctgatctacaccgcgggcggctacttccgacagtcgctcagctacctggaggcttacaaccccagtgacggcacctggctccggttggcggacctgcaggtgccgcggagcggcctggccggctgcgtggtgggcgggctgttgtacgccgtgggcggcaggaacaactcgcccgacggcaacaccgactccagcgccctggactgttacaaccccatgaccaatcagtggtcgccctgcgcccccatgagcgtgccccgtaaccgcatcggggtgggggtcatcgatggccacatctatgccgtcggcggctcccacggctgcatccaccacaacagtgtggagaggtatgagccagagcgggatgagtggcacttggtggccccaatgctgacacgaaggatcggggtgggcgtggctgtcctcaatcgtctcctttatgccgtggggggctttgacgggacaaaccgccttaattcagctgagtgttactacccagagaggaacgagtggcgaatgatcacagcaatgaacaccatccgaagcggggcaggcgtctgcgtcctgcacaactgtatctatgctgctgggggctatgatggtcaggaccagctgaacagcgtggagcgctacgatgtggaaacagagacgtggactttcgtagcccccatgaagcaccggcgaagtgccctggggatcactgtccaccaggggagaatctacgtccttggaggctatgatggtcacacgttcctggacagtgtggagtgttacgacccagatacagacacctggagcgaggtgacccgaatgacatcgggccggagtggggtgggcgtggctgtcaccatggagccctgccggaagcagattgaccagcagaactgtacctgttga

SEQ ID NO: 669 - DNA, 5097 bp, Homo Sapiens
atggtgggagaactccgctacagggaattcagggtgcccctggggcccggcttacatgcctatcctgatgagctgatccgccagcgcgtgggccatgatgggcatcctgagtaccagatccgttggctcatcctgcggcgtggcgatgagggggacgggggctctggccaagtggactgcaaggctgagcacatcctgctgtggatgtccaaggatgagatctatgccaactgccacaagatgctgggcgaggatggccaggtcatcgggccctcccaggagtctgcaggggaggttggggccctggacaaatctgtgctggaggagatggaaaccgacgtgaagtccctcattcagagagcccttcggcagctggaggagtgtgtgggcactatccctcctgctcctctacttcacactgtccacgtgctcagcgcctatgccagcattgagcccctcactggagtattcaaggacccaagggtcctggacttgctcatgcacatgttgagtagtcctgattatcagattcgctggagtgcaggccggatgatacaagccctgtcctcccatgacgctgggacccggactcagatccttctgtcactgagccaacaagaagccattgagaaacacctggattttgacagccgctgtgctctgctagcactgtttgcacaggccacgctctctgaacaccccatgtctttcgagggcattcagctaccacaggtcccaggaagggtgctcttctccctggtgaagcggtatttgcatgtcacctcgctcctggatcagctgaacgacagtgctgcggagccaggagcccagaacacctctgctcctgaggagttgagtggggagaggggtcaactggagctggagttcagtatggccatgggcaccctgatctcggagctggtgcaagccatgcgctgggaccaggcctcagacagaccaaggagctcagcacggtcccccggttccatcttccagcctcagctggcagatgtgagcccagggctccccgctgcccaggctcagccctccttcaggaggtcaagacgttttcgccctcgttctgagttcgcaagtggcaatacctatgctttgtatgtgcgggacacactgcagccggggatgcgagtgcggatgctggatgattatgaggagatcagtgccggggatgagggcgagtttcggcagagcaacaacggtgtgcctcctgtgcaggtattttgggagtcaacaggccgcacctattgggtgcactggcacatgctggagatcttgggctttgaggaagacattgaggacatggttgaggctgatgagtaccaaggggcagtggccagtagagtcctgggtagagccctgcctgcctggcgctggaggcccatgacagaactctatgctgtgccttatgtgctgcctgaggatgaggacactgaggagtgtgaacacctgaccctggctgagtggtgggaactcctcttcttcatcaagaagctggatggacctgaccatcaggaggttctccagatcctccaggagaacctagatggggagattctggatgatgagatcctagctgaactggccgtgcccatagaattggcccaggacttgctgctgactctgccacagcgactcaatgacagtgccctcagggacctgatcaactgccatgtctacaagaagtatgggcctgaagccctagcagggaaccaagcctacccatcccttctagaagcccaagaagatgtcctcctgctagacgcgcaggcccaggctaaggactcagaagatgcagccaaagtggaagcaaaagaacccccatctcagagtcccaacactcccctgcagcgtctggtggagggttatggtccagctgggaaaatcctcctggatctagagcaagccctcagctcagaggggacccaggagaacaaggtcaagccactcctgctgcagctgcagcggcagccgcagcccttcctggcactgatgcagagcctggacactccggagactaacaggaccctgcacctgactgtgctgagaatcctgaagcagctggtggacttccccgaggcactgctgctcccctggcacgaggccgtggatgcctgcatggcctgcctgcggtccccaaacactgatcgagaggtgctccaggaactgattttcttcctgcaccgcctgacctcagtgagcagggactatgccgtggtgctgaatcagctgggagcaagagacgctatctccaaggccctggaaaagcacctgggaaagctggagctggctcaggagctgcgggacatggtgttcaagtgtgagaagcatgcccacctctaccgcaaactcatcaccaacatcctgggaggctgcatccagatggtgctgggccagatcgaagaccacagacgaacccaccaacccatcaacatccctttctttgatgtgttcctcagatacctgtgccagggctccagtgtggaagtgaaggaggacaagtgctgggagaaggtggaggtgtcctccaacccgcaccgggccagcaagctgacggaccacaaccccaagacctattgggagtccaacggcagcgccggctcccactacatcaccctgcacatgcgccggggcatcctcatcaggcaactgactctgcttgtggctagtgaggactcgagttacatgccggcccgagtggtggtgtgcgggggtgatagcactagctctcttcacacggaactcaactcggtgaatgtgatgccctctgccagccgggtgatcctcctggagaacctgacccgcttctggcccatcatccagatccgcataaagcgctgccagcagggtggcattgatacgcgcattcgggggttagagatcctaggccccaagcccacgttctggccagtgttccgggagcagctctgtcgtcacacacgcctcttctacatggttcgggcacaggcctggagccaggacatggcagaggaccgcaggagcctcctgcacctgagttctagactcaacggtgctctgcgccaggagcagaattttgctgaccgcttcctccctgatgacgaggctgcccaagctctgggcaagacctgctgggaggccctggtcagccccgtggtgcagaacatcacctcccctgatgaggatggcattagccccctgggttggctgctggaccagtacctggagtgtcaggaagctgtcttcaacccccagagccgcggcccagctttcttctcgcgggtgcgccgtctcactcacctgctggtgcatgtcgagccctgtgaggcaccccctcctgtggtggccactcctcggcccaaaggcagaaacagaagccacgactggagctccttggctacccggggccttccaagcagcatcatgagaaacctgacgcgctgttggcgggccgtggtggagaagcaggtgaacaattttctgacctcatcctggcgggatgatgactttgtgccacgctactgtgagcactttaatattctgcagaactcaagctctgaactgtttgggcctcgggcagccttcttgctggcgctgcaaaatggctgtgcgggagccttgctgaagctcccttttctcaaagctgcccacgtgagtgagcagttcgcccggcacattgaccagcagatccagggcagccggatcggtggagcccaggaaatggagaggctggcacagctgcagcaatgcctgcaagctgtcctgattttctccggcttggagatagccaccacttttgagcattattaccagcactacatggcggaccgtctcctgggcgtggtctcgagctggctggagggggccgtgctggagcagatcggtccctgcttccccaaccgcctcccccagcagatgttgcagagcctgagcacctctaaggagctgcagcgccagttccacgtctaccagctccagcagctggatcaggaactcctgaagctggaggatacagagaagaaaatacaggtgggccttggggccagtggcaaggagcacaagagcgagaaggaagaggaagctggggcagcagcagtggtggatgtggcggagggagaggaggaagaggaggagaatgaggacctctactatgaaggggcaatgccagaagtgtctgtgcttgtcctgtcccgacactcctggcctgttgcctcaatctgccacacactgaaccccagaacctgcctgccctcctacctgaggggcactttgaacagatactccaacttctacaacaagagtcagagccaccctgcccttgagcgaggctcacagaggcgactgcagtggacgtggctgggctgggctgagctgcagtttgggaaccagaccctgcatgtgtccaccgtgcagatgtggctactgctgtatctcaacgacctgaaggcggtctctgtggagagtctgctggcgttctcagggctctccgcagacatgctcaatcaggcgattgggcccctcacctcttcaagaggccccctggaccttcacgagcaaaaggatataccaggaggggtcctcaagattcgagatggcagcaaggaacccaggtcgagatgggacattgtgcggctcatcccacctcagacgtacctgcaagctgagggtgaagacggccagaacttggagaagagacggaatcttctgaactgcctcatcgtccgaatcctcaaggcccatggagatgaggggctgcacattgaccagcttgtctgtctggtgctggaggcttggcagaagggcccgtgtcctcccaggggtttggtcagcagccttggtaaggggtctgcatgcagcagcactgacgtcctctcctgcatcctacacctcctgggcaagggcacgctgagacgccatgacgaccggccccaggtgctgtcctatgcagtccctgtgactgtcatggagcctcacactgagtccctgaacccaggctcctcaggccccaacccacccctcaccttccataccctacagattcgctcccggggtgtgccctatgcctcctgcactgccacccagagcttctctaccttccggtag

SEQ ID NO: 670 - DNA, 2697 bp, Homo Sapiens
atgttcagccagcagcagcagcagcagctccagcaacagcagcagcagctccagcagttacagcagcagcagctccagcagcagcaattgcagcagcagcagttactgcagctccagcagctgctccagcagtccccaccacaggccccgttgcccatggctgtcagccgggggctccccccgcagcagccacagcagccgcttctgaatctccagggcaccaactcagcctccctcctcaacggctccatgctgcagagagctttgcttttacagcagttgcaaggactggaccagtttgcaatgccaccagccacgtatgacactgccggtctcaccatgcccacagcaacactgggtaacctccgaggctatggcatggcatccccaggcctcgcagcccccagcctcacacccccacaactggccactccaaatttgcaacagttctttccccaggccactcgccagtccttgctgggacctcctcctgttggggtccccatgaacccttcccagttcaacctttcaggacggaacccccagaaacaggcccggacctcctcctctaccacccccaatcgaaaggattcttcttctcagacaatgcctgtggaagacaagtcagaccccccagaggggtctgaggaagccgcagagccccggatggacacaccagaagaccaagatttaccgccctgcccagaggacatcgccaaggaaaaacgcactccagcacctgagcctgagccttgtgaggcgtccgagctgccagcaaagagattgaggagctcagaagagcccacagagaaggaacctccagggcagttacaggtgaaggcccagccgcaggcccggatgacagtaccgaaacagacacagacaccagacctgctgcctgaggccctggaagcccaagtgctgccacgattccagccacgggtcctgcaggtccaggcccaggtgcagtcacagactcagccgcggataccatccacagacacccaggtgcagccaaagctgcagaagcaggcgcaaacacagacctctccagagcacttagtgctgcaacagaagcaggtgcagccacagctgcagcaggaggcagagccacagaagcaggtgcagccacaggtacagccacaggcacattcacagggcccaaggcaggtgcagctgcagcaggaggcagagccgctgaagcaggtgcagccacaggtgcagccccaggcacattcacagcccccaaggcaggtgcagctgcagctgcagaagcaggtccagacacagacatatccacaggtccacacacaggcacagccaagcgtccagccacaggagcatcctccagcgcaggtgtcagtacagccaccagagcagacccatgagcagcctcacacccagccgcaggtgtcgttgctggctccagagcaaacaccagttgtggttcatgtctgcgggctggagatgccacctgatgcagtagaagctggtggaggcatggaaaagaccttgccagagcctgtgggcacccaagtcagcatggaagagattcagaatgagtcggcctgtggcctagatgtgggagaatgtgaaaacagagcgagagagatgccaggggtatggggcgccgggggctccctgaaggtcaccattctgcagagcagtgacagccgggcctttagcactgtacccctgacacctgtcccccgccccagtgactccgtctcctccacccctgcggctaccagcactccctctaagcaggccctccagttcttctgctacatctgcaaggccagctgctccagccagcaggagttccaggaccacatgtcggagcctcagcaccagcagcggctaggggagatccagcacatgagccaagcctgcctcctgtccctgctgcccgtgccccgggacgtcctggagacagaggatgaggagcctccaccaaggcgctggtgcaacacctgccagctctactacatgggggacctgatccaacaccgcaggacacaggaccacaagattgccaaacaatccttgcgacccttctgcaccgtttgcaaccgctacttcaaaacccctcgcaagtttgtggagcacgtgaagtcccaggggcataaggacaaagccaaggagctgaagtcgcttgagaaagaaattgctggccaagatgaggaccacttcattacagtggacgctgtgggttgcttcgagggtgatgaagaagaggaagaggatgatgaggatgaagaagagatcgaggttgaggaggaactctgcaagcaggtgaggtccagagatatatccagagaggagtggaagggctcggagacctacagccccaatactgcatatggtgtggacttcctggtgcccgtgatgggctatatctgccgcatctgccacaagttctatcacagcaactcaggggcacagctctcccactgcaagtccctgggccactttgagaacctgcagaaatacaaggcggccaagaaccccagccccaccacccgacctgtgagccgccggtgcgcaatcaacgcccggaacgctttgacagccctgttcacctccagcggccgcccaccctcccagcccaacacccaggacaaaacacccagcaaggtgacggctcgaccctcccagcccccactacctcggcgctcaacccgcctcaaaacctga

SEQ ID NO: 671 - DNA, 906 bp, Homo Sapiens
atgacgcggcatggcaagaactgcaccgcaggggccgtctacacctaccacgagaagaagaaggacacagcggcctcgggctatgggacccagaacattcgactgagccgggatgccgtgaaggacttcgactgctgttgtctctccctgcagccttgccacgatcctgttgtcaccccagatggctacctgtatgagcgtgaggccatcctggagtacattctgcaccagaagaaggagattgcccggcagatgaaggcctacgagaagcagcggggcacccggcgcgaggagcagaaggagcttcagcgggcggcctcgcaggaccatgtgcggggcttcctggagaaggagtcggctatcgtgagccggcccctcaaccctttcacagccaaggccctctcgggcaccagcccagatgatgtccaacctgggcccagtgtgggtcctccaagtaaggacaaggacaaagtgctgcccagcttctggatcccgtcgctgacgcccgaagccaaggccaccaagctggagaagccgtcccgcacggtgacctgccccatgtcagggaagcccctgcgcatgtcggacctgacgcccgtgcacttcacaccgctagacagctccgtggaccgcgtggggctcatcacccgcagcgagcgctacgtgtgtgccgtgacccgcgacagcctgagcaacgccaccccctgcgctgtgctgcggccctctggggctgtggtcaccctcgaatgcgtggagaagctgattcggaaggacatggtggaccctgtgactggagacaaactcacagaccgcgacatcatcgtgctgcagcggggcggtaccggcttcgcgggctccggagtgaagctgcaagcggagaaatcacggccggtgatgcaggcctga

SEQ ID NO: 672 - DNA, 1767 bp, Homo Sapiens
atgtcgtcgggcctccgcgccgctgacttcccccgctggaagcgccacatctcggagcaactgaggcgccgggaccggctgcagagacaggcgttcgaggagatcatcctgcagtataacaaattgctggaaaagtcagatcttcattcagtgttggcccagaaactacaggctgaaaagcatgacgtaccaaacaggcacgagataagtcccggacatgatggcacatggaatgacaatcagctacaagaaatggcccaactgaggattaagcaccaagaggaactgactgaattacacaagaaacgtggggagttagctcaactggtgattgacctgaataaccaaatgcagcggaaggacagggagatgcagatgaatgaagcaaaaattgcagaatgtttgcagactatctctgacctggagacggagtgcctagacctgcgcactaagctttgtgaccttgaaagagccaaccagaccctgaaggatgaatatgatgccctgcagatcacttttactgccttggagggaaaactgaggaaaactacggaagagaaccaggagctggtcaccagatggatggctgagaaagcccaggaagccaatcggcttaatgcagagaatgaaaaagactccaggaggcggcaagcccggctgcagaaagagcttgcagaagcagcaaaggaacctctaccagtcgaacaggatgatgacattgaggtcattgtggatgaaacttctgatcacacagaagagacctctcctgtgcgagccatcagcagagcagccacgagacgctctgtctcttccttcccagtcccccaggacaatgtggatactcatcctggttctggtaaagaagtgagggtaccagctactgccttgtgtgtcttcgatgcacatgatggggaagtcaacgctgtgcagttcagtccaggttcccggttactggccactggaggcatggaccgcagggttaagctttgggaagtatttggagaaaaatgtgagttcaagggttccctatctggcagtaatgcaggaattacaagcattgaatttgatagtgctggatcttacctcttagcagcttcaaatgattttgcaagccgaatctggactgtggatgattatcgattacggcacacactcacgggacacagtgggaaagtgctgtctgctaagttcctgctggacaatgcgcggattgtctcaggaagtcacgaccggactctcaaactctgggatctacgcagcaaagtctgcataaagacagtgtttgcaggatccagttgcaatgatattgtctgcacagagcaatgtgtaatgagtggacattttgacaagaaaattcgtttctgggacattcgatcagagagcatagttcgagagatggagctgttgggaaagattactgccctggacttaaacccagaaaggactgagctcctgagctgctcccgtgatgacttgctaaaagttattgatctccgaacaaatgctatcaagcagacattcagtgcacctgggttcaagtgcggctctgactggaccagagttgtcttcagccctgatggcagttacgtggcggcaggctctgctgagggctctctgtatatctggagtgtgctcacagggaaagtggaaaaggttctttcaaagcagcacagctcatccatcaatgcggtggcgtggtcgccctctggctcgcacgttgtcagtgtggacaaaggatgcaaagctgtgctgtgggcacagtactga

SEQ ID NO: 673 - DNA, 603 bp, Homo Sapiens
atggatgacaaaaagaagaaacggagtcccaagccctgcctggcccagccagcccaggccccaggcacactacggagggtccctgtgcctaccagccacagcggctccttggccctaggacttcctcatctgccatcccccaagcagcgggccaagttcaagagagtaggcaaagagaagtgccgcccagtcctggctggaggtggaagcggctctgcaggcacgcccctgcagcactccttcctgaccgaggtgactgatgtctatgagatggaggggggactcctgaacctgctcaatgatttccactctggccggctgcaggccttcgggaaggaatgctcctttgagcagctggagcacgttcgggagatgcaggagaagctagcccggctgcacttcagcctggatgtgtgtggggaggaggaggacgatgaagaggaagaggatggggtcactgaggggctgccagaggagcagaagaagacaatggctgaccgtaacctggaccagctgcttagcaatctggaagacctcagtaattctatccagaagctgcacctggccgagaacgccgagcctgaggagcagtccgctgcgtag

SEQ ID NO: 674 - DNA, 364 bp, Homo Sapiens
gccgcccgagtgggaaccgcgctggaggaaggcgctgcgcggcaaggagaacaaggggtctgtggaaatcatgagaaaggacttgaatgacgcccgggacctgcatggccaggcagagtcagcagctgcagtgtggaagggacacgtgatggaccgtaggaagaaggcactgaccgactacaagaagctgcgggccttctttgtggaggaggaggagcatttcctgcaggaggctgagaaggaggaggggctccctgaggacgagctggctgaccccactgagcggttcaggtcactgctgcaggcggtctcggagctggagaagaagcatcgcaacctgggcctcagcatgctgctgcagtga

SEQ ID NO: 675 - DNA, 426 bp, Homo Sapiens
atgttacacagtatgcgatttttgagaactgatagtgcatcagctgacccaggtaatttaaaatattcttcatccagagatagaggtggttcttcctcttacggactgcaaccttcaaattcagctgtggtgtctcggcaaaggcacgatgataccagagtccacgctgacatacagaatgacgaaaagggtggctacagtgtcaatggaggatctggggaaaatacttatggtcggaagtcgttggggcaagagctgagggttaacaatgtgaccagccctgagttcaccagtgttcagcatggcagtcgtgctttagccaccaaagacatgaggaaatcacaggagagatcgatgtcttattgtgatgagtctcgactgtcaaatcttcttcggaggatcacccgggaagacgacagagactga

SEQ ID NO: 676 - DNA, 831 bp, Homo Sapiens
atgggaaacagcatgaaatccacccctgcgcctgccgagaggcccctgcccaacccggagggactggatagcgacttccttgccgtgctaagtgactacccgtctcctgacatcagccccccgatattccgccgaggggagaaactgcgtgtgatttctgatgaagggggctggtggaaagctatttctcttagcactggtcgagagagttacatccctggaatatgtgtggccagagtttaccatggctggctgtttgagggcctgggcagagacaaggccgaggagctgctgcagctgccagacacaaaggtcggctccttcatgatcagagagagtgagaccaagaaagggttttactcactgtcggtgagacacaggcaggtaaagcattaccgcattttccgtctgcccaacaactggtactacatttccccgaggctcaccttccagtgcctggaggacctggtgaaccactattctgaggtggctgatggcctgtgctgtgtgctcaccacgccctgcctgacacaaagcacggctgccccagcagtgagggcctccagctcacctgtcaccttgcgtcagaagactgtggactggaggagagtgtccagactgcaggaggaccccgagggaacagagaacccgcttggggtagacgagtcccttttcagctatggccttcgagagagcattgcctcttacctgtccctgaccagtgaggacaacacctcctttgatcgaaagaagaaaagcatctccctgatgtatggtggcagcaagagaaagagctcattcttctcatcaccaccttactttgaggactag

SEQ ID NO: 677 - DNA, 603 bp, Homo Sapiens
atggcccagcagagagccctgccccagagcaaggagacgctgctgcagtcctacaacaagcggctgaaggacgacattaagtccatcatggacaacttcaccgagatcatcaagaccgccaagattgaggacgagacgcaggtgtcacgggccactcagggtgaacaggacaattacgagatgcatgtgcgagccgccaacatcgtccgagccggcgagtccctgatgaagctggtgtccgacctcaagcagttcctgatcctcaatgacttcccctccgtgaacgaggccattgaccagcgcaaccagcagctgcgcacactgcaggaggagtgcgaccggaagctcatcacgctgcgagacgagatctccattgacctctacgagctggaggaggagtattactcgtccagctcaagcctttgcgaagctaatgacctgcctctgtgcgaagcttacgggaggctggacctcgacacagactctgctgatggcctctcggcccctctgctggcgtccccggagcccagtgctggccccctacaggtggcagcccctgcccactcccatgctggtggccctggccccactgagcacgcctga

SEQ ID NO: 678 - DNA, 444 bp, Homo Sapiens
atggcttctcatcgtctgctcctcctctgccttgctggactggtatttgtgtctgaggctggccctacgggcaccggtgaatccaagtgtcctctgatggtcaaagttctagatgctgtccgaggcagtcctgccatcaatgtggccgtgcatgtgttcagaaaggctgctgatgacacctgggagccatttgcctctgggaaaaccagtgagtctggagagctgcatgggctcacaactgaggaggaatttgtagaagggatatacaaagtggaaatagacaccaaatcttactggaaggcacttggcatctccccattccatgagcatgcagaggtggtattcacagccaacgactccggcccccgccgctacaccattgccgccctgctgagcccctactcctattccaccacggctgtcgtcaccaatcccaaggaatga

SEQ ID NO: 679 - DNA, 1386 bp, Homo Sapiens
atggcggaggtgggggagataatcgagggctgccgcctacccgtgctgcggcggaaccaggacaacgaagatgagtggcccctggccgagatcctgagcgtgaaggacatcagtggccggaagcttttctacgtccattacattgacttcaacaaacgtctggatgaatgggtgacgcatgagcggctggacctaaagaagatccagttccccaagaaagaggccaagacccccactaagaacggacttcctgggtcccgtcctggctctccagagagagaggtgaaacggaaggtggaggtggtttcaccagcaactccagtgcccagcgagacagccccggcctcggtttttccccagaatggagccgcccgtagggcagtggcagcccagccaggacggaagcgaaaatcgaattgtttgggcactgatgaggactcccaggacagctctgatggaataccgtcagcaccacgcatgactggcagcctggtgtctgatcgaagccacgacgacatcgtcacccggatgaagaacattgagtgcattgagctgggccggcaccgcctcaagccgtggtacttctccccgtacccacaggaactcaccacattgcctgtcctctacctgtgcgagttctgcctcaagtacggccgtagtctcaagtgtcttcagcgtcatttgaccaagtgtgacctacgacatcctccaggcaatgagatttaccgcaagggcaccatctccttctttgagattgatggacgtaagaacaagagttattcccagaacctgtgtcttttggccaagtgtttccttgaccataagacactgtactatgacacagaccctttcctcttctacgtcatgacagagtatgactgtaagggcttccacatcgtgggctacttctccaaggagaaagaatcaacggaagactacaatgtggcctgcatcctaaccctgcctccctaccagcgccggggctacggcaagctgctgatcgagttcagctatgaactctccaaagtggaagggaaaacagggacccctgagaagcccctctcagaccttggcctcctatcctatcgaagctactggtcccagaccatcctggagatcctgatggggctgaagtcggagagcggggagaggccacagatcaccatcaatgagattagtgaaatcaccagcatcaagaaggaggatgtcatctccactctgcagtacctcaatctcatcaactactacaagggccagtacatcctcacactgtcagaggacatcgtggatggccatgagcgggccatgctcaagcggctcctgcggatcgactccaagtgtctgcacttcactcccaaggactggagcaagagggggaagtggtga

SEQ ID NO: 680 - DNA, 1020 bp, Homo Sapiens
atgatggattctcagctggtagctggtgttgcattcaagaagactttctcttacgctgggtttgaaatgcaacccaaaaagtaccacaatcccaagattgcccttttgaatgtcgagctcgagttgaaagctgagaaagacaatgctgagataagagtccacacagttgaggattatcaggcaattgttgatgctgagtggaacattctctatgacaagttagagaagatccatcattctggagccaaagttgtcttgtccaaactccccattggggatgtggccacccagtactttgctgacagggacatgttctgtgctggccgagtacctgaggaggatctgaagaggacaatgatggcctgtggaggctcaatccagaccagtgtgaatgctctgtcagcagatgtgctgggtcgatgccaggtgtttgaagagacccagattggaggcgagaggtacaatttttttactggctgccccaaggccaagacatgcaccttcattctccgtggcggcgccgagcagtttatggaggagacagagcggtccctgcatgatgccatcatgatcgtcaggagggccatcaagaatgattcagtggtggctggtggcggggccattgagatggaactctccaagtacctgcgggattactcaaggactattccaggaaaacagcagctgttgattggggcatatgccaaggccttggagattatcccacgccagctgtgtgacaatgctggctttgatgccacaaacattctcaacaagctgcgggctcggcatgcccaggggggtacatggtatggagtagacatcaacaacgaggacattgctgacaactttgaagctttcgtgtgggagccagctatggtgcggatcaatgcgctgacagcagcctctgaggctgcgtgcctgatcgtgtctgtagatgaaaccatcaagaacccccgctcgactgtggatgctcccacagcagcaggccggggccgtggtcgtggccgcccccactga

SEQ ID NO: 681 - DNA, 711 bp, Homo Sapiens
atgttctgcaccctgaacacccacaaagtggacatggacaagctcctggggggccagatcgggctggaggacttcatcttcgcccacgtgaaggggcagcgcaaggaggtggaggtgttcaagtcggaggatgcactcgggctcaccatcacggacaacggggctggctacgccttcatcaagcgcatcaaggagggcagcgtgatcgaccacatccacctcatcagcgtgggcgacatgatcgaggccattaacgggcagagcctgctgggctgccggcactacgaggtggcccggctgctcaaggagctgccccgaggccgtaccttcacgctgaagctcacggagcctcgcaaggccttcgacatgatcagccagcgttcagcgggtggccgccctggctctggcccacaactgggcactggccgagggaccctgcggctccgatcccggggccccgccacggtggaggatctgccctctgcctttgaagagaaggccattgagaaggtggatgacctgctggagagttacatgggtatcagggacacggagctggcggccaccatggtggagctgggaaaggacaaaaggaacccggatgagctggccgaggccctggacgaacggctgggtgactttgccttccctgacgagttcgtctttgacgtctggggcgccattggggacgccaaggtcggccgctactag

SEQ ID NO: 682 - DNA, 1959 bp, Homo Sapiens
atgggcggatggaaggggccggggcagcgtcggggaaaggaagggccggaggcgcggcggcgggcggccgagaggggcggcggcggcggcggcggcggggttcccgcgccgcggagcccggcccgagagccgcgtccacgttcctgcctcctgctcccgccgccctggggcgccgccatgacgcccgatctgctcaacttcaagaagggatggatgtcgatcttggacgagcctggagagcctccctccccctcgctcaccaccacctctacttcgcagtggaagaaacattggtttgtgctgacagattcaagtctcaaatattacagagactccactgctgaggaggcagatgagctggatggtgagatcgacctgcgttcctgcacggatgtcactgagtacgcggtgcagcgcaactatggcttccagatccacaccaaggatgctgtctataccttgtcggccatgacctcaggcatccggcggaactggatcgaggctctgagaaagaccgtacgtccaacttcagccccagatgtcaccaagctctcggactctaacaaggagaacgcgctgcacagctacagcacccagaagggccccctgaaggcaggggagcagcgggcgggctctgaggtcatcagccggggtggccctcggaaggcggacgggcagcgtcaggccttggactacgtggagctctcgccgctgacccaggcttccccgcagcgggcccgcaccccagcccgcactcctgaccgcctggccaagcaggaggagctggagcgggacctggcccagcgctccgaggagcggcgcaagtggtttgaggccacagacagcaggaccccagaggtgcctgctggtgaggggccgcgccggggcctgggtgcccccctgactgaggaccagcaaaaccggcttagtgaggagatcgagaagaagtggcaggagctggagaagctgcccctgcgggagaataagcgggtgcccctcactgccctgctcaaccaaagccgcggagagcgccgagggcccccaagtgacggccacgaggcactggagaaggaggttcaggctcttcgggcccagctggaggcgtggcgtctccaaggggaggctcctcagagtgcactgagatcccaggaggatggccacatccccccgggctacatctcacaggaggcatgtgagcgcagcctggcagagatggagtcctcgcaccagcaggtgatggaggagctgcagcggcaccacgagcgggagctgcagcgcctgcagcaggagaaggagtggctcctggctgaggagacggcagccacggcctcagccattgaagccatgaagaaggcctaccaggaagagctgagccgagagctgagcaaaacacggagtctccagcagggcccggatggcctccggaagcagcaccagtcagatgtggaggcactgaagcgagagctgcaggtgctatcggagcagtactcgcagaagtgcctggagattggggcactcatgcggcaggctgaggagcgcgagcacacgctgcgccgctgccagcaggagggccaggagctgctgcgccacaaccaggagctgcatggccgcctgtcagaggagatagaccagctgcgcggcttcattgcctcgcagggcatgggcaatggctgcgggcgcagcaacgagcggagttcctgcgagctagaggtgctgcttcgcgtaaaagaaaacgaactccagtacctaaagaaggaggtgcagtgcctccgggacgagctccagatgatgcagaaggacaagcgcttcacctcgggaaagtaccaggacgtctatgtggagctgagccacatcaagacacggtctgagcgggagatcgagcagctgaaggagcacctgcgtcttgccatggccgccctccaggagaaggagtcgatgcgcaacagcctggctgagtag

SEQ ID NO: 683 - DNA, 4515 bp, Homo Sapiens
atggcgaccgcgcgcaccttcgggcccgagcgggaagccgagccggccaaggaagcgcgcgtcgtgggctcggagcttgtggacacttatacggtttacatcatccaggtcactgatggcagccatgagtggacagtaaagcaccgctacagcgacttccatgacctgcatgaaaagctcgttgcagagagaaagattgataaaaatctgcttccgcccaaaaagataattgggaaaaactcaagaagcttggtggagaagagggagaaggatctggaggtctacctccagaagctcctggctgccttccctggcgtgacccccagagtactggcccacttcttgcattttcacttctatgagataaatggcatcaccgcggcactggctgaagagctctttgagaaaggagaacagctcctgggggccggcgaggtctttgccattggacccctgcagctgtatgccgtcacggagcagctgcagcagggaaagcccacgtgcgccagtggggatgccaagaccgacctcgggcacatcctggacttcacctgtcgccttaagtaccttaaggtttctggcacagaaggaccttttgggaccagcaacattcaggagcagctcctgccgttcgacctatcaatattcaagtccctgcatcaggtggagataagtcactgtgatgctaagcacatcagagggctggtcgcatcgaagcccaccttagccacgctgagtgtccgcttctcagcaacctcgatgaaggaagtccttgttcctgaagcctcagaatttgatgagtgggagcctgaaggcacaaccctagaaggccctgtgactgccgtcatccccacttggcaggcattgaccacgcttgacctgagccacaacagcatctccgagatcgacgagtctgtgaaactgatcccaaagattgagttcctggacctgagtcacaatggattgctggttgtggacaatctgcagcacctgtataaccttgtgcatctggacctgtcctacaacaagctctcctccttggaagggcttcacaccaagctggggaacatcaagaccttaaacctggcaggcaacctcctagagagtctgagtggcctgcacaagctctactcactggtcaacctggatctccgggacaacaggatcgaacagatggaggaggtccggagcataggcagcctcccgtgtctggagcacgtgtctctgctgaacaaccctctgagcatcatccccgactaccggaccaaggtgctggctcagttcggagagagggcctcagaggtctgtctggatgacacagtgaccacagagaaggagctggacactgtggaagtgctgaaagcaattcagaaagccaaggaggtcaagtccaaactgagcaacccagagaagaagggtggtgaagactcccggctctcagctgccccctgcatcagacccagcagctcccctcccactgtggctcccgcatctgcctccctgccccagcccatcctctctaaccaaggaatcatgttcgttcaggaggaggccctggccagcagcctctcgtccactgacagtctgactcccgagcaccagcccattgcccagggatgttctgattccttggagtccatccctgcgggacaggcagcttccgatgatttaagggacgtgccaggagctgttggtggtgcaagcccagaacatgccgagccggaggtccaggtggtgccggggtctggccagatcatcttcctgcccttcacctgcattggctacacggccaccaatcaggacttcatccagcgcctgagcacactgatccggcaggccatcgagcggcagctgcctgcctggatcgaggctgccaaccagcgggaggagggccagggtgaacagggcgaggaggaggatgaggaggaggaagaagaggaggacgtggctgagaaccgctactttgaaatggggcccccagacgtggaggaggaggagggaggaggccagggggaggaagaggaggaggaagaggaggatgaagaggccgaggaggagcgcctggctctggaatgggccctgggcgcggacgaggacttcctgctggagcacatccgcatcctcaaggtgctgtggtgcttcctgatccatgtgcagggcagtatccgccagttcgccgcctgccttgtgctcaccgacttcggcatcgcagtcttcgagatcccgcaccaggagtctcggggcagcagccagcacatcctctcctccctgcgctttgtcttttgcttcccgcatggcgacctcaccgagtttggcttcctcatgccggagctgtgtctggtgctcaaggtacggcacagtgagaacacgctcttcattatctcggacgccgccaacctgcacgagttccacgcggacctgcgctcatgctttgcaccccagcacatggccatgctgtgtagccccatcctctacggcagccacaccagcctgcaggagttcctgcgccagctgctcaccttctacaaggtggctggcggctgccaggagcgcagccagggctgcttccccgtctacctggtctacagtgacaagcgcatggtgcagacggccgccggggactactcaggcaacatcgagtgggccagctgcacactctgttcagccgtgcggcgctcctgctgcgcgccctctgaggccgtcaagtccgccgccatcccctactggctgttgctcacgccccagcacctcaacgtcatcaaggccgacttcaaccccatgcccaaccgtggcacccacaactgtcgcaaccgcaacagcttcaagctcagccgtgtgccgctctccaccgtgctgctggaccccacacgcagctgtacccagcctcggggcgcctttgctgatggccacgtgctagagctgctcgtggggtaccgctttgtcactgccatcttcgtgctgccccacgagaagttccacttcctgcgcgtctacaaccagctgcgggcctcgctgcaggacctgaagactgtggtcatcgccaagacccccgggacgggaggcagcccccagggctcctttgcggatggccagcctgccgagcgcagggccagcaatgaccagcgtccccaggaggtcccagcagaggctctggccccggccccagcggaagtcccagctccagcccctgcagcagcctcagcctcaggcccagcgaagactccggccccagcagaggcctcaacttcagctttggtcccagaggagacgccagtggaagctccagccccacccccagccgaggcccctgcccagtacccgagtgagcacctcatccaggccacctcggaggagaatcagatcccctcgcacttgcctgcctgcccgtcgctccggcacgtcgccagcctgcggggcagcgccatcatcgagctcttccacagcagcattgctgaggttgaaaacgaggagctgaggcacctcatgtggtcctcggtggtgttctaccagaccccagggctggaggtgactgcctgcgtgctgctctccaccaaggctgtgtactttgtgctccacgacggcctccgccgctacttctcagagccactgcaggatttctggcatcagaaaaacaccgactacaacaacagccctttccacatctcccagtgcttcgtgctaaagcttagtgacctgcagtcagtcaatgtggggcttttcgaccagcatttccggctgacgggttccaccccgatgcaggtggtcacgtgcttgacgcgggacagctacctgacgcactgcttcctccagcacctcatggtcgtgctgtcctctctggaacgcacgccctcgccggagcctgttgacaaggacttctactccgagtttgggaacaagaccacagggaagatggagaactacgagctgatccactctagtcgcgtcaagtttacctaccccagtgaggaggagattggggacctgacgttcactgtggcccaaaagatggctgagccagagaaggccccagccctcagcatcctgctgtacgtgcaggccttccaggtgggcatgccaccccctgggtgctgcaggggccccctgcgccccaagacactcctgctcaccagctccgagatcttcctcctggatgaggactgtgtccactacccactgcccgagtttgccaaagagccgccgcagagagacaggtaccggctggacgatggccgccgcgtccgggacctggaccgagtgctcatgggctaccagacctacccgcaggccctcaccctcgtcttcgatgacgtgcaaggtcatgacctcatgggcagtgtcaccctggaccactttggggaggtgccaggtggcccggctagagccagccagggccgtgaagtccagtggcaggtgtttgtccccagtgctgagagcagagagaagctcatctcgctgttggctcgccagtgggaggccctgtgtggccgtgagctgcctgtcgagctcaccggctag

SEQ ID NO: 684 - DNA, 828 bp, Homo Sapiens
atggccagctttcccccgagggtcaacgagaaagagatcggaaaactcctccttaacttggtagatcatactgaagtggtcagagatttaacttttgctccagatggaagcttgatcctggtgtcagcttcaagagacaaaactctcagagtatgggacctgaaagatgatggaaacatgatgaaagtattgagggggcatcagaattgggtgtacagctgtgcattctctcctgactcttctatgctgtgttcagtcggagccagtaaagcagttttcctttggaatatggataaatacaccatgatacggaaactagaaggacatcaccatgatgtggtagcttgtgacttttctcctgatggagcattactggctactgcatcttatgatactcgagtatatatctgggatccacataatggagacattctgatggaatttgggcacctgtttcccccacctactccaatatttgctggaggagcaaatgaccggtgggtacgatctgtatcttttagccatgatggactgcatgttgcaagccttgctgatgataaaatggtgaggttctggagaattgatgaggattatccagtgcaagttgcacctttgagcaatggtctttgctgtgccttctctactgatggcagtgttttagctgctgggacacatgacggaagtgtgtatttttgggccactccacggcaggtccctagcctgcaacatttatgtcgcatgtcaatccgaagagtgatgcccacccaagaagttcaggagctgccgattccttccaagcttttggagtttctctcgtatcgtatttag

SEQ ID NO: 685 - DNA, 1602 bp, Homo Sapiens
atggcttttgcaaatctgcggaaagtgctcatcagtgacagcctggacccttgctgccggaagatcttgcaagatggagggctgcaggtggtggaaaagcagaaccttagcaaagaggagctgatagcggagctgcaggactgtgaaggccttattgttcgctctgccaccaaggtgaccgctgatgtcatcaacgcagctgagaaactccaggtggtgggcagggctggcacaggtgtggacaatgtggatctggaggccgcaacaaggaagggcatcttggttatgaacacccccaatgggaacagcctcagtgccgcagaactcacttgtggaatgatcatgtgcctggccaggcagattccccaggcgacggcttcgatgaaggacggcaaatgggagcggaagaagttcatgggaacagagctgaatggaaagaccctgggaattcttggcctgggcaggattgggagagaggtagctacccggatgcagtcctttgggatgaagactatagggtatgaccccatcatttccccagaggtctcggcctcctttggtgttcagcagctgcccctggaggagatctggcctctctgtgatttcatcactgtgcacactcctctcctgccctccacgacaggcttgctgaatgacaacacctttgcccagtgcaagaagggggtgcgtgtggtgaactgtgcccgtggagggatcgtggacgaaggcgccctgctccgggccctgcagtctggccagtgtgccggggctgcactggacgtgtttacggaagagccgccacgggaccgggccttggtggaccatgagaatgtcatcagctgtccccacctgggtgccagcaccaaggaggctcagagccgctgtggggaggaaattgctgttcagttcgtggacatggtgaaggggaaatctctcacgggggttgtgaatgcccaggcccttaccagtgccttctctccacacaccaagccttggattggtctggcagaagctctggggacactgatgcgagcctgggctgggtcccccaaagggaccatccaggtgataacacagggaacatccctgaagaatgctgggaactgcctaagccccgcagtcattgtcggcctcctgaaagaggcttccaagcaggcggatgtgaacttggtgaacgctaagctgctggtgaaagaggctggcctcaatgtcaccacctcccacagccctgctgcaccaggggagcaaggcttcggggaatgcctcctggccgtggccctggcaggcgccccttaccaggctgtgggcttggtccaaggcactacgcctgtactgcaggggctcaatggagctgtcttcaggccagaagtgcctctccgcagggacctgcccctgctcctattccggactcagacctctgaccctgcaatgctgcctaccatgattggcctcctggcagaggcaggcgtgcggctgctgtcctaccagacttcactggtgtcagatggggagacctggcacgtcatgggcatctcctccttgctgcccagcctggaagcgtggaagcagcatgtgactgaagccttccagttccacttctaa

SEQ ID NO: 686 - DNA, 1515 bp, Homo Sapiens
atgtccctaatctgctccatctctaacgaagtgccggagcacccatgtgtatcccctgtctctaatcatgtttatgagcggcggctcatcgagaagtacattgcggagaatggtaccgaccccatcaacaaccagcctctctccgaggagcagctcatcgacatcaaagttgctcacccaatccggcccaagcctccctcagccaccagcatcccggccattctgaaagctttgcaggatgagtgggatgcagtcatgctgcacagcttcactctgcgccagcagctgcagacaacccgccaagagctgtcacacgctctgtaccagcacgatgccgcctgccgtgtcattgcccgtctcaccaaggaagtcactgctgcccgagaagctctggctaccctgaaaccacaggctggcctcattgtgccccaggctgtgccaagttcccaaccaagtgttgtgggtgcgggtgagccaatggatttgggtgagctggtgggaatgaccccagagattattcagaagcttcaagacaaagccactgtgctaaccacggagcgcaagaagagagggaagactgtgcctgaggagctggtgaagccagaagagctcagcaaataccggcaggtggcatcccacgtggggttgcacagtgccagcattcctgggatcctggccctggacctctgcccgtccgacaccaacaagatcctcactggtggggcggataaaaatgtcgttgtgtttgacaaaagttctgaacaaatcctggctaccctcaaaggccataccaagaaggtcaccagcgtggtgtttcacccttcccaggacctggtgttttctgcttcccccgatgccactatcaggatttggtcggtccccaatgcctcttgtgtacaggtggttcgggcccatgagagtgctgtgacaggcctcagccttcatgccactggcgactatctcctgagctcctccgatgatcagtactgggctttctctgacatccagacagggcgtgtgctcaccaaggtgacagatgagacctccggctgctctctcacctgtgcacagttccaccctgacggactcatctttggaacaggaaccatggactctcagatcaagatctgggacttgaaggaacgtactaatgtggccaacttccctggccactcgggccccatcactagcatcgccttctctgagaatggttactacctggctacagcggctgatgactcctctgtcaagctctgggatctgcgcaagcttaagaactttaagactttgcagctggataacaactttgaggtaaagtcactgatctttgaccagagtggtacctacctggctcttgggggcacggatgtccagatctacatctgcaaacaatggacggagattcttcactttacagagcatagcggcctgaccacaggggtggccttcgggcatcacgccaagttcatcgcttcaacaggcatggacagaagcctcaagttctacagcctgtag

SEQ ID NO: 687 - DNA, 585 bp, Homo Sapiens
atgaagatctggacttcggagcacgtctttgaccacccgtgggaaactgttacaacagctgcaatgcagaaatacccaaaccctatgaacccaagtgtggttggagttgatgtgttggacagacatatagatccctctggaaagttgcacagccacagacttctcagcacagagtggggactgccttccattgtgaagtctcttattggtgcagcaagaacgaaaacatatgtgcaagaacattctgtagttgatcctgtagagaaaacaatggaacttaaatctactaatatttcatttacaaacatggtttcagtagatgagagacttatatacaaaccacatcctcaggatccagaaaaaactgttttgacacaagaagccataattaccgtgaaaggagttagcctcagcagttaccttgaaggactgatggcaagtacgatatcctcaaatgctagtaaaggccgagaagcaatggaatgggtaatacataaattaaatgctgagattgaagaactgacagcctcagcaagaggaaccataaggactccaatggcagcagcagcgtttgcagagaagtga

SEQ ID NO: 688 - DNA, 540 bp, Homo Sapiens
atggcggctacggagccgatcttggcggccactgggagtcccgcggcggtgccaccggagaaactggaaggagccggttcgagctcagcccctgagcgtaactgtgtgggctcctcgctgccagaggcctcaccgcctgcccctgagccttccagtcccaacgccgcggtccctgaagccatccctacgccccgagctgcggcctccgcggccctggagctgcctctcgggcccgcacccgtgagcgtagcgcctcaggccgaagctgaagcgcgctccacaccaggccccgccggctctagactcggtcccgagacgttccgccagcgtttccggcagttccgctaccaggatgcggcgggtccccgggaggctttccggcagctgcgggagctgtcccgccagtggctgcggcctgacatccgcaccaaggagcagatcgtggagatgctggtgcaagagcagctgctcgccatcctgcccgaggcggctcgggcccggcggatccgccgccgcacggatgtgcgcatcactggctga

SEQ ID NO: 689 - DNA, 1005 bp, Homo Sapiens
atggccactaggcagagggaatcctctatcacctcctgctgttccacctcgagctgcgacgcagacgacgagggcgtgcgcggcacctgcgaagatgcttccctgtgcaagaggtttgcagtaagcattggctactggcatgacccttacatacagcactttgtgagactgtctaaagagaggaaagcccctgaaatcaacagaggatattttgctcgagtccatggtgtcagtcagcttataaaggcatttctacggaagacagaatgtcattgtcaaattgtcaaccttggggcaggcatggataccaccttctggagattaaaggatgaagatcttctcccaagtaaatattttgaggttgactttccaatgattgtcacgagaaagctgcacagtatcaaatgcaagcctcccctatccagccccattctagaactgcattcagaggacacacttcagatggatggacacatactggattcaaagagatatgccgttattggagcagatctccgagacctgtctgaactggaagagaagctaaagaaatgtaacatgaatacacaattgccaacactcctgatagctgaatgtgtgctggtttacatgactccagagcagtccgcaaacctcctgaagtgggcagccaacagttttgagagagccatgttcataaactacgaacaggtgaacatgggtgatcggtttgggcagatcatgattgaaaacctgcggagacgccagtgtgacctggcgggagtggagacctgcaagtcattagagtcacagaaagaacggctcctgtcgaatgggtgggaaacagcatcggccgtcgacatgatggagttgtacaacaggttacctcgagctgaagtgagcaggatagaatcacttgaattcctggatgaaatggagctgctggagcagctcatgcggcattactgcctttgctgggcaaccaaaggaggaaatgagcttgggctgaaggagataacttattaa

SEQ ID NO: 690 - DNA, 2481 bp, Homo Sapiens
atggtggcacccgtgctggagacttctcacgtgttttgctgcccaaaccgggtgcggggagtcctgaactggagctctgggcccagaggacttctggcctttggcacgtcctgctccgtggtgctctatgaccccctgaaaagggttgttgttaccaacttgaatggtcacaccgcccgagtcaattgcatacagtggatttgtaaacaggatggctccccttctactgaattagtttctggaggatctgataatcaagtgattcactgggaaatagaggataatcagcttttaaaagcagtgcatcttcaaggccatgaaggacctgtttatgcggtgcatgctgtttaccagaggaggacatcagatcctgcattatgtacactgatcgtttctgcagctgcagattctgctgttcgactctggtctaaaaagggtccagaagtaatgtgccttcagactttaaactttggaaatggatttgctttggctctctgcttatcttttttgccaaatactgatgtaccaatattagcatgtggcaatgatgattgcagaattcacatatttgctcaacaaaatgatcagtttcagaaagtgctttctctctgtggacatgaggattggattagaggagtggaatgggcagcctttggtagagatcttttcctagcaagctgttcacaagattgcctgataagaatatggaagctgtatataaagtcaacatctttagaaactcaggatgacgataacataagactgaaagaaaatacttttaccatagaaaatgaaagtgttaaaatagcatttgctgttactctggagacagtgctagccggtcatgaaaactgggtaaatgcagttcactggcaacctgtgttttacaaagatggtgtcctacagcagccagtgagattattatctgcttccatggataaaaccatgattctctgggctccagatgaagagtcaggagtttggctagaacaggttcgagtaggtgaagtaggtgggaatactttgggattttatgattgccagttcaatgaagatggctccatgatcattgctcatgctttccacggagcgttgcacctttggaaacagaatacagttaacccaagagagtggactccagagattgtcatttcaggacactttgatggtgtccaagacctagtctgggatccagaaggagaatttattatcactgttggtactgatcagacaactagactttttgctccatggaagagaaaagaccaatcacaggtgacttggcatgaaattgcaaggcctcagatacatgggtatgacctgaaatgtttggcaatgattaatcggtttcagtttgtatctggagcagatgaaaaagttcttcgggttttttctgcacctcggaattttgtggaaaatttttgtgccattacaggacaatcactgaatcatgtgctctgtaatcaagatagtgatcttccagaaggagccactgtccctgcattgggattatcaaataaagctgtctttcagggagatatagcttctcagccttctgatgaagaggagctgttaactagtactggttttgagtatcagcaggtggcctttcagccctccatacttactgagcctcccactgaggatcatcttctgcagaatactttgtggcctgaagttcaaaaactatatgggcacggttatgaaatattttgtgttacttgtaacagttcaaagactctgcttgcctcagcttgtaaggcagctaagaaagagcatgcagctatcattctttggaacactacatcttggaaacaggtgcagaatttagttttccacagtttgacagtcacgcagatggccttctcacctaatgagaagttcttactagctgtttccagagatcgaacctggtcattgtggaaaaagcaggatacaatctcacctgagttcgagccagtttttagtctttttgccttcaccaacaaaattacttctgtgcacagtagaattatttggtcttgtgattggagtcctgacagcaagtatttcttcactgggagtcgagacaaaaaggtggttgtctggggtgagtgcgactccactgatgactgtattgagcacaacattggcccctgctcctcagtcctggacgtgggtggggctgtgacagctgtcagcgtctgcccagtgctccacccttctcaacgatacgtggttgcagtaggattggagtgtggaaagatttgcttatatacctggaaaaagactgatcaagttccagaaataaatgactggacccactgtgtagaaacaagtcaaagccaaagtcatacactggctatcagaaaattatgctggaagaattgcagtggaaaaactgaacagaaggaagcagaaggtgctgagtggttacactttgcaagctgtggtgaagatcacactgtgaagatacacagagtcaataaatgtgcactgtaa

SEQ ID NO: 691 - DNA, 927 bp, Homo Sapiens
atgaatcccatcgtagtggtccacggcggcggagccggtcccatctccaaggatcggaaggagcgagtgcaccagggcatggtcagagccgccaccgtgggctacggcatcctccgggagggcgggagcgccgtggatgccgtagagggagctgtcgtcgccctggaagacgatcccgagttcaacgcaggttgtgggtctgtcttgaacacaaatggtgaggttgaaatggatgctagtatcatggatggaaaagacctgtctgcaggagcagtgtccgcagtccagtgtatagcaaatcccattaaacttgctcggcttgtcatggaaaagacacctcattgctttctgactgaccaaggcgcagcgcagtttgcagcagctatgggggttccagagattcctggagaaaaactggtgacagagagaaacaaaaagcgcctggaaaaagagaagcatgaaaaaggtgctcagaaaacagattgtcaaaaaaacttgggaaccgtgggtgctgttgccttggactgcaaagggaatgtagcctacgcaacctccacaggcggtatcgttaataaaatggtcggccgcgttggggactcaccgtgtctaggagctggaggttatgccgacaatgacatcggagccgtctcaaccacagggcatggggaaagcatcctgaaggtgaacctggctagactcaccctgttccacatagaacaaggaaagacggtagaagaggctgcggacctatcgttgggttatatgaagtcaagggttaaaggtttaggtggcctcatcgtggttagcaaaacaggagactgggtggcaaagtggacctccacctccatgccctgggcagccgccaaggacggcaagctgcacttcggaattgatcctgacgatactactatcaccgaccttccctaa

SEQ ID NO: 692 - DNA, 528 bp, Homo Sapiens
atgccgaagtcgtgcgcggcccggcagtgctgcaaccgctacagcagccgcaggaagcagctcaccttccaccggtttccgttcagccgcccggagctgctgaaggaatgggtgctgaacatcggccggggcaacttcaagcccaagcagcacacggtcatctgctccgagcacttccggccagagtgcttcagcgcctttggaaaccgcaagaacctaaagcacaatgccgtgcccacggtgttcgcctttcaggaccccacacagcaggtgagggagaacacagaccctgccagtgagagaggaaatgccagctcttctcagaaagaaaagacttcaccctgccgttcccaggtcctccctgaggcgggggccggagaggacagtcctgggagaaacatggacactgcacttgaagagcttcagttgcccccaaatgccgaaggccacgtaaaacaggcaatgttgtttaatgtagaaaatggaaccccagcttcacgtgaagccttgtggttgagtgaggagtga

SEQ ID NO: 693 - DNA, 879 bp, Homo Sapiens
atggagctgctgtgttgcgaaggcacccggcacgcgccccgggccgggccggacccgcggctgctgggggaccagcgtgtcctgcagagcctgctccgcctggaggagcgctacgtaccccgcgcctcctacttccagtgcgtgcagcgggagatcaagccgcacatgcggaagatgctggcttactggatgctggaggtatgtgaggagcagcgctgtgaggaggaagtcttccccctggccatgaactacctggatcgctacctgtcttgcgtccccacccgaaaggcgcagttgcagctcctgggtgcggtctgcatgctgctggcctccaagctgcgcgagaccacgcccctgaccatcgaaaaactgtgcatctacaccgaccacgctgtctctccccgccagttgcgggactgggaggtgctggtcctagggaagctcaagtgggacctggctgctgtgattgcacatgatttcctggccttcattctgcaccggctctctctgccccgtgaccgacaggccttggtcaaaaagcatgcccagacctttttggccctctgtgctacagattatacctttgccatgtacccgccatccatgatcgccacgggcagcattggggctgcagtgcaaggcctgggtgcctgctccatgtccggggatgagctcacagagctgctggcagggatcactggcactgaagtggactgcctgcgggcctgtcaggagcagatcgaagctgcactcagggagagcctcagggaagcctctcagaccagctccagcccagcgcccaaagccccccggggctccagcagccaagggcccagccagaccagcactcctacagatgtcacagccatacacctgtag

SEQ ID NO: 694 - DNA, 717 bp, Homo Sapiens
atggcggcggctccgctgctgctgctgctgctgctcgtgcccgtgccgctgctgccgctgctggcccaagggcccggaggggcgctgggaaaccggcatgcggtgtactggaacagctccaaccagcacctgcggcgagagggctacaccgtgcaggtgaacgtgaacgactatctggatatttactgcccgcactacaacagctcgggggtgggccccggggcgggaccggggcccggaggcggggcagagcagtacgtgctgtacatggtgagccgcaacggctaccgcacctgcaacgccagccagggcttcaagcgctgggagtgcaaccggccgcacgccccgcacagccccatcaagttctcggagaagttccagcgctacagcgccttctctctgggctacgagttccacgccggccacgagtactactacatctccacgcccactcacaacctgcactggaagtgtctgaggatgaaggtgttcgtctgctgcgcctccacatcgcactccggggagaagccggtccccactctcccccagttcaccatgggccccaatgtgaagatcaacgtgctggaagactttgagggagagaaccctcaggtgcccaagcttgagaagagcatcagcgggaccagccccaaacgggaacacctgcccctggccgtgggcatcgccttcttcctcatgacgttcttggcctcctag

SEQ ID NO: 695 - DNA, 1050 bp, Homo Sapiens
atggaggcccacaacgcgtctgccccattcaacttcaccctgccacccaactttggcaagcgccccacagacctggcactgagcgtcatcctggtgttcatgttgttcttcatcatgctctcgctgggctgcaccatggagttcagcaagatcaaggctcacttatggaagcctaaagggctggccatcgccctggtggcacagtatggcatcatgcccctcacggcctttgtgctgggcaaggtcttccggctgaagaacattgaggcactggccatcttggtctgtggctgctcacctggagggaacctgtccaatgtcttcagtctggccatgaagggggacatgaacctcagcattgtgatgaccacctgctccaccttctgtgcccttggcatgatgcctctcctcctgtacatctactccagggggatctatgatggggacctgaaggacaaggtgccctataaaggcatcgtgatatcactggtcctggttctcattccttgcaccatagggatcgtcctcaaatccaaacggccacaatacatgcgctatgtcatcaagggagggatgatcatcattctcttgtgcagtgtggccgtcacagttctctctgccatcaatgtggggaagagcatcatgtttgccatgacaccactcttgattgccacctcctccctgatgccttttattggctttctgctgggttatgttctctctgctctcttctgcctcaatggacggtgcagacgcactgtcagcatggagactggatgccaaaatgtccaactctgttccaccatcctcaatgtggcctttccacctgaagtcattggaccacttttcttctttcccctcctctacatgattttccagcttggagaagggcttctcctcattgccatattttggtgctatgagaaattcaagactcccaaggataaaacaaaaatgatctacacagctgccacaactgaagaaacaattccaggagctctgggaaatggcacctacaaaggggaggactgctccccttgcacagcctag

SEQ ID NO: 696 - DNA, 3627 bp, Homo Sapiens
atggagcggctgcgggacgtgcgggagcggctgcaggcgtgggagcgcgcgttccgacggcagcgcgggcggcgaccgagccaggacgacgtggaggcggcgccggaggagacccgcgcgctctaccgggaataccgcactctgaagcgtaccacgggccaggccggcggcgggctccgcagctccgagtcgctccccgcggcggccgaagaggcgccagagccccgctgctgggggccccatctgaatcgggctgcgaccaagagtccacagcctacgccagggcggagccgccagggctcggtgccggactacgggcagcggctcaaggccaatctgaaaggcaccctgcaggccggaccagccctgggccgcagaccgtggcctctaggaagagcctcatctaaggcatccaccccaaagcccccaggtacagggcctgtcccctcctttgcagaaaaagtcagtgatgagcctccacagctccctgagccccagccaaggccaggccggctccagcatctgcaggcatccctgagccagcggctgggctccctagatcctggctggttacagcgatgtcacagtgaggtcccagattttctgggggcccccaaagcctgcaggcctgatctaggctcagaggaatcacaacttctgatccctggtgagtcggctgtccttggtcctggtgctggctcccagggcccagaggcttcagccttccaagaagtcagcatccgtgtggggagcccccagcccagcagcagtggaggcgagaagcggagatggaacgaggagccctgggagagccccgcacaggtccagcaggagagcagccaagctggacccccatcggagggggctggggctgtagcagttgaggaagaccctccaggggaacctgtacaggcacagccacctcagccctgcagcagcccatcgaaccccaggtaccacggactcagcccctccagtcaagctagggctgggaaggctgagggcacagcccccctgcacatcttccctcggctggcccgccatgacaggggcaattacgtacggctcaacatgaagcagaaacactacgtgcggggccgggcactccgtagcaggctcctccgcaagcaggcatggaagcagaagtggcggaagaaaggggagtgttttgggggtggtggtgccacagtcacaaccaaggagtcttgtttcctgaacgagcagttcgatcactgggcagcccagtgtccccggccagcaagtgaggaagacacagatgctgttgggcctgagccactggttccttcaccacaacctgtacctgaggtgcccagcctggaccccaccgtgctgccactctactccctggggccctcagggcagttggcagagacgccggctgaggtgttccaggccctggagcagctggggcaccaagcctttcgccctgggcaggagcgtgcagtcatgcggatcctgtctggcatctccacgctgctggtgctgcctacaggtgccggcaagtccctgtgctaccagctcccagcgctgctctacagccggcgcagcccctgcctcacgttggtcgtctctcccctgctgtcactcatggatgaccaggtgtctggcctgccaccgtgtctcaaggcggcctgcatacactcgggcatgaccaggaagcaacgggaatctgtcctgcagaagattcgggcagcccaggtacacgtgctgatgctgacacctgaggcactggtgggggcgggaggcctccctccagccgcacagctgcctccagttgcttttgcctgcattgatgaggcccactgcctctcccagtggtcccacaacttccggccctgctacctgcgcgtctgcaaggtgcttcgggagcgcatgggcgtgcactgcttcctgggcctcacagccacagccacacgccgcactgccagtgacgtggcacagcacctggctgtggctgaagagcctgacctccacgggccagccccagttcccaccaacctgcacctttccgtgtccatggacagggacacagaccaggcactgttgacgctgctgcaaggcaaacgttttcaaaacctcgattccattatcatttactgcaaccggcgcgaggacacagagcggatcgctgcgctcctccgaacctgcctgcacgcagcctgggtcccagggtctggaggtcgtgcccccaaaaccacagccgaggcctaccacgcgggcatgtgcagccgggaacggcggcgggtacagcgagccttcatgcagggccagttgcgggtggtggtggccacggtggcctttgggatggggctggaccggccagatgtgcgggctgtgctgcatctggggctgcccccaagcttcgagagctacgtgcaggccgtgggccgggccgggcgtgacgggcagcctgcccactgccacctcttcctgcagccccagggcgaagacctgcgagagctgcgcagacatgtgcacgccgacagcacggacttcctggctgtgaagaggctggtacagcgcgtgttcccagcctgcacctgcacctgcaccaggccgccctcggagcaggaaggggccgtgggtggggagaggcctgtgcccaagtacccccctcaagaggctgagcagcttagccaccaagcagccccaggacccagaagggtctgcatgggccatgagcgggcactcccaatacagcttaccgtacaggctttggacatgccggaggaggccatcgagactttgctgtgctacctggagctgcacccacaccactggctggagctgctggcgaccacctatacccattgccgtctgaactgccctgggggccctgcccagctccaggccctggcccacaggtgtccccctttggctgtgtgcttggcccagcagctgcctgaggacccagggcaaggcagcagctccgtggagtttgacatggtcaagctggtggactccatgggctgggagctggcctctgtgcggcgggctctctgccagctgcagtgggaccacgagcccaggacaggtgtgcggcgtgggacaggggtgcttgtggagttcagtgagctggccttccaccttcgcagcccgggggacctgaccgctgaggagaaggaccagatatgtgacttcctctatggccgtgtgcaggcccgggagcgccaggccctggcccgtctgcgcagaaccttccaggcctttcacagcgtagccttccccagctgcgggccctgcctggagcagcaggatgaggagcgcagcaccaggctcaaggacctgctcggccgctactttgaggaagaggaagggcaggagccgggaggcatggaggacgcacagggccccgagccagggcaggccagactccaggattgggaggaccaggtccgctgcgacatccgccagttcctgtccctgaggccagaggagaagttctccagcagggctgtggcccgcatcttccacggcatcggaagcccctgctacccggcccaggtgtacgggcaggaccgacgcttctggagaaaatacctgcacctgagcttccatgccctggtgggcctggccacggaagagctcctgcaggtggcccgctga

SEQ ID NO: 697 - DNA, 927 bp, Homo Sapiens
atgaagcattacgaggtggagattctggacgcaaagacaagggagaagctgtgtttcttggacaaggtggagccccacgccaccattgcggagatcaagaacctcttcactaagacccatccgcagtggtaccccgcccgccagtccctccgcctggaccccaagggcaagtccctgaaggatgaggatgttctgcagaagctgcccgtgggcaccacggccacactgtacttccgggacctgggggcccagatcagctgggtgacggtcttcctaacagagtacgcggggccccttttcatctacctgctcttctacttccgagtgcccttcatctatggccacaaatatgactttacgtccagtcggcatacagtggtgcacctcgcctgcatctgtcactcattccactacatcaagcgcctgctggagacgctcttcgtgcaccgcttctcccatggcactatgcctttgcgcaacatcttcaagaactgcacctactactggggcttcgccgcgtggatggcctattacatcaatcaccctctctacactccccctacctacggagctcagcaggtgaaactggcgctcgccatctttgtgatctgccagctcggcaacttctccatccacatggccctgcgggacctgcggcccgctgggtccaagacgcggaagatcccataccccaccaagaaccccttcacgtggctcttcctgctggtgtcctgccccaactacacctacgaggtggggtcctggatcggtttcgccatcatgacgcagtgtctcccagtggccctgttctccctggtgggcttcacccagatgaccatctgggccaagggcaagcaccgcagctacctgaaggagttccgggactacccgcccctgcgcatgcccatcatccccttcctgctctga

SEQ ID NO: 698 - DNA, 1503 bp, Homo Sapiens
atggcggcggcgtctgtctctgcggcttctggttctcacttgtcgaacagctttgctgagccatcaaggtctaatggaagcatggttcggcattcttcatctccatatgtagtatatccttcggataagcctttccttaatagtgatctacgacgctccccaagtaagcctacacttgcctatccagaaagcaacagcagagccatattttctgctcttaagaatcttcaagataagattcgacgcttggaacttgagaggattcaggcagaagaaagtgtgaaaaccttgtctagagaaacaattgaatataagaaagtactggatgaacagatacaagaaagggagaattcaaagaatgaggaatcaaagcacaatcaagaactgacatctcagttgttagctgcagaaaataaatgcaatctattagaaaaacaattggaatacatgcgaaatatgataaagcatgccgaaatggagaggacatctgtcttagagaaacaagtttccctagaaagagaacgacaacatgatcaaacacatgttcagagccaacttgaaaaattggatcttcttgaacaggagtataacaaacttaccacaatgcaggcccttgcagaaaaaaaaatgcaagagttggaagcaaaactccatgaagaagaacaggaaaggaaacgcatgcaagctaaggcagctgagttgcagactggtctagaaacaaatagacttatctttgaagataaggcaactccgtgtgttcccaatgcaagaagaattaaaaaaaagaagtcaaaaccaccagaaaagaaaagttctaggaactattttggtgcacaaccacattatagattatgcttgggtgatatgccatttgtagctgggaagtccacaagccctagccatgccgtggtagccaatgttcagcttgtcttgcatctaatgaagcaacacagtaaagctttgtgcaatgatcgagtcatcaacagtattcctttggcaaagcaagtatcttcacgaggtggtaaaagtaagaagttgtcagtaacacctccctcctccaacggtattaatgaggagttgtcagaagtcttacagactttacaggatgaatttgggcaaatgagctttgatcaccagcagcttgcaaaacttatccaggagtcgccaaccgttgaactgaaagacaagttggagtgtgaattggaggcattagtgggaaggatggaagcaaaagccaaccaaataactaaagttcgaaaataccaagcccagctggagaaacagaagttagagaagcagaagaaggaattaaaagctaccaaaaagactcttgatgaagaaagaaacagcagcagccgttctggaatcacagggaccacaaataagaaagattttatgaaactgagacctggagaaaaaaggagaaaaaatcttcagttattgaaggacatgcaaagcatacagaattcattacaaagcagtagtttgtgttgggattactga

SEQ ID NO: 699 - DNA, 1095 bp, Homo Sapiens
atgaatagaacagcaatgagagccagtcagaaggactttgaaaattcaatgaatcaagtgaaactcttgaaaaaggatccaggaaacgaagtgaagctaaaactctacgcgctatataagcaggccactgaaggaccttgtaacatgcccaaaccaggtgtatttgacttgatcaacaaggccaaatgggacgcatggaatgcccttggcagcctgcccaaggaagctgccaggcagaactatgtggatttggtgtccagtttgagtccttcattggaatcctctagtcaggtggagcctggaacagacaggaaatcaactgggtttgaaactctggtggtgacctccgaagatggcatcacaaagatcatgttcaaccggcccaaaaagaaaaatgccataaacactgagatgtatcatgaaattatgcgtgcacttaaagctgccagcaaggatgactcaatcatcactgttttaacaggaaatggtgactattacagtagtgggaatgatctgactaacttcactgatattccccctggtggagtagaggagaaagctaaaaataatgccgttttactgagggaatttgtgggctgttttatagattttcctaagcctctgattgcagtggtcaatggtccagctgtgggcatctccgtcaccctccttgggctattcgatgccgtgtatgcatctgacagggcaacatttcatacaccatttagtcacctaggccaaagtccggaaggatgctcctcttacacttttccgaagataatgagcccagccaaggcaacagagatgcttatttttggaaagaagttaacagcgggagaggcatgtgctcaaggacttgttactgaagttttccctgatagcacttttcagaaagaagtctggaccaggctgaaggcatttgcaaagcttcccccaaatgccttgagaatttcaaaagaggtaatcaggaaaagagagagagaaaaactacacgctgttaatgctgaagaatgcaatgtccttcagggaagatggctatcagatgaatgcacaaatgctgtggtgaacttcttatccagaaaatcaaaactgtga

SEQ ID NO: 700 - DNA, 1593 bp, Homo Sapiens
atgtcgatgcctgacgcgatgccgctgcccggggtcggggaggagctgaagcaggccaaggagatcgaggacgccgagaagtactccttcatggccaccgtcaccaaggcgcccaagaagcaaatccagtttgctgatgacatgcaggagttcaccaaattccccaccaaaactggccgaagatctttgtctcgctcgatctcacagtcctccactgacagctacagttcagctgcatcctacacagatagctctgatgatgaggtttctccccgagagaagcagcaaaccaactccaagggcagcagcaatttctgtgtgaagaacatcaagcaggcagaatttggacgccgggagattgagattgcagagcaagacatgtctgctctgatttcactcaggaaacgtgctcagggggagaagcccttggctggtgctaaaatagtgggctgtacacacatcacagcccagacagcggtgttgattgagacactctgtgccctgggggctcagtgccgctggtctgcttgtaacatctactcaactcagaatgaagtagctgcagcactggctgaggctggagttgcagtgttcgcttggaagggcgagtcagaagatgacttctggtggtgtattgaccgctgtgtgaacatggatgggtggcaggccaacatgatcctggatgatgggggagacttaacccactgggtttataagaagtatccaaacgtgtttaagaagatccgaggcattgtggaagagagcgtgactggtgttcacaggctgtatcagctctccaaagctgggaagctctgtgttccggccatgaacgtcaatgattctgttaccaaacagaagtttgataacttgtactgctgccgagaatccattttggatggcctgaagaggaccacagatgtgatgtttggtgggaaacaagtggtggtgtgtggctatggtgaggtaggcaagggctgctgtgctgctctcaaagctcttggagcaattgtctacattaccgaaatcgaccccatctgtgctctgcaggcctgcatggatgggttcagggtggtaaagctaaatgaagtcatccggcaagtcgatgtcgtaataacttgcacaggaaataagaatgtagtgacacgggagcacttggatcgcatgaaaaacagttgtatcgtatgcaatatgggccactccaacacagaaatcgatgtgaccagcctccgcactccggagctgacgtgggagcgagtacgttctcaggtggaccatgtcatctggccagatggcaaacgagttgtcctcctggcagagggtcgtctactcaatttgagctgctccacagttcccacctttgttctgtccatcacagccacaacacaggctttggcactgatagaactctataatgcacccgaggggcgatacaagcaggatgtgtacttgcttcctaagaaaatggatgaatacgttgccagcttgcatctgccatcatttgatgcccaccttacagagctgacagatgaccaagcaaaatatctgggactcaacaaaaatgggccattcaaacctaattattacagatactaa

SEQ ID NO: 701 - DNA, 1728 bp, Homo Sapiens
atgggaatcactctgcatctgcttttacactctgatcgagatcctattccagatgttcctgcagtatactttgtaatgccaactgaagaaaatattgacagaatgtgccaggatcttcgaaatcaactatatgaatcatattatttaaattttatttctgctatttcaagaagtaaactggaagatattgcaaatgcagcgttagcagctagtgcagtaacacaagtagccaaggtttttgaccaatatctcaattttattactttggaagatgatatgtttgtattatgtaatcaaaataaggagcttgtttcatatcgtgccattaacaggccagatatcacagacacggaaatggaaactgttatggacactatagttgacagcctcttctgcttttttgttactctgggtgctgttcctataatcagatgttcaagaggaacagcagcagaaatggtagcagtgaaactagacaagaaacttcgagaaaatctaagagatgcaagaaacagtctttttacaggtgatacacttggagctggccaattcagcttccagaggcccttattagtccttgttgacagaaacatagatttggcaactcctttacatcatacttggacatatcaagcattggtgcacgatgtactggatttccatttaaacagggttaatttggaagaatcttcaggagtggaaaactctccagctggtgctagaccaaagagaaaaaacaagaagtcttatgatttaactccggttgataaattttggcaaaaacataaaggaagtccattcccagaagttgcagaatcagttcagcaagaactagaatcttacagagcacaggaagatgaggtcaaacgacttaaaagcattatgggactagaaggggaagatgaaggagccataagtatgctttctgacaataccgctaagctaacatcagctgttagttctttgccagaactccttgagaaaaaaagacttattgatctccatacaaatgttgccactgctgttttagaacatataaaggcaagaaaattggatgtatattttgaatatgaagaaaaaataatgagcaaaactactctggataaatctcttctagatataatatcagaccctgatgcaggaactccagaagataaaatgaggttgtttcttatctattatataagcacacagcaagcaccttctgaggctgatttggagcaatataaaaaagctttaactgatgcaggatgcaaccttaatcctttacaatatatcaaacagtggaaggcttttaccaagatggcctcagctccggccagctatggcagcactaccactaaaccaatgggtcttttatcacgagtcatgaatacaggatcacagtttgtgatggaaggagtgaagaacctggttttgaaacagcaaaatctacctgttactcgtattttggacaatcttatggagatgaagtcaaaccccgaaactgatgactatagatattttgatcccaaaatgctgcggggcaatgacagctcagttcccagaaataaaaatccattccaagaggccattgtttttgtggtgggaggaggcaactacattgaatatcagaatcttgttgactacataaaggggaaacaaggcaaacacattttatatggctgcagtgagctttttaatgctacacagttcataaaacagttgtcacaacttggacaaaagtaa

SEQ ID NO: 702 - DNA, 1038 bp, Homo Sapiens
atgttggctgcaaggctggtgtgtctccggacactaccttctagggttttccacccagctttcaccaaggcctcccctgttgtgaagaattccatcacgaagaatcaatggctgttaacacctagcagggaatatgccaccaaaacaagaattgggatccggcgtgggagaactggccaagaactcaaagaggcagcattggaaccatcgatggaaaaaatatttaaaattgatcagatgggaagatggtttgttgctggaggggctgctgttggtcttggagcattgtgctactatggcttgggactgtctaatgagattggagctattgaaaaggctgtaatttggcctcagtatgtcaaggatagaattcattccacctatatgtacttagcagggagtattggtttaacagctttgtctgccatagcaatcagcagaacgcctgttctcatgaacttcatgatgagaggctcttgggtgacaattggtgtgacctttgcagccatggttggagctggaatgctggtacgatcaataccatatgaccagagcccaggcccaaagcatcttgcttggttgctacattctggtgtgatgggtgcagtggtggctcctctgacaatattagggggtcctcttctcatcagagctgcatggtacacagctggcattgtgggaggcctctccactgtggccatgtgtgcgcccagtgaaaagtttctgaacatgggtgcacccctgggagtgggcctgggtctcgtctttgtgtcctcattgggatctatgtttcttccacctaccaccgtggctggtgccactctttactcagtggcaatgtacggtggattagttcttttcagcatgttccttctgtatgatacccagaaagtaatcaagcgtgcagaagtatcaccaatgtatggagttcaaaaatatgatcccattaactcgatgctgagtatctacatggatacattaaatatatttatgcgagttgcaactatgctggcaactggaggcaacagaaagaaatga

SEQ ID NO: 703 - DNA, 1200 bp, Homo Sapiens
atgtctcaggtgacatttagtgatgtggctatagacttctctcatgaagagtgggcatgcctagattctgctcagagggacttatacaaggatgtgatggtccagaattatgagaacctggtctctgtaggtctttccgtaactaagccatatgtgatcatgttattggaggatggaaaagagccctggatgatggagaaaaaactgtcaaaagattgggaatcaagatgggaaaacaaggaattatcaacaaagaaggatatttatgatgaagattcaccccaaccagtaacaatggaaaaagttgtaaaacaaagttatgaattttcaaattctaataagaatttggaatatacagaatgcgacacatttagaagcacctttcattcaaagtctactctttctgaaccacaaaacaattctgctgaagggaattcacacaaatatgatatattaaagaagaatttatcaaaaaagtcagttataaaaagtgagagaataaatggtggaaagaaacttttaaattctaataaaagtggggcagccttcaaccagagcaaatctcttacccttccccagacttgtaatagagagaaaatctatacatgcagtgaatgtgggaaagcctttggcaaacagtcaatcctcagtcgccactggagaattcatacaggagagaagccctatgaatgtcgtgaatgtgggaagacttttagccatggttcatcccttacacgacatcagataagccatagtggagagaaaccttacaaatgcattgaatgtgggaaggcctttagccatggctcatcacttactaaccatcagagcactcacacgggagagaaaccgtatgaatgtatgaactgtggaaagtcttttagtcgtgtgtcccttctcattcagcatctaagaattcatacgcaagaaaaacgctatgagtgtcgtatatgtggaaaggccttcattcatagttcgtctctcattcaccatcagaaaagccatactggagagaagccttatgaatgtagagaatgtgggaaagctttctgctgtagctcacaccttactcaacatcaaagaattcacagtatgaagaaaaaatatgaatgcaacaaatgtctcaaggtctttagtagcttctcatttcttgttcaacatcagagtattcatactgaagaaaaaccgtttgaagtttag

SEQ ID NO: 704 - DNA, 507 bp, Homo Sapiens
atgctgttccggctctcagagcactcctcaccagaggaggaagcctccccccaccagagagcctcaggagaggggcaccatctcaagtcgaagagacccaacccctgtgcctacacaccaccttcgctgaaagctgtgcagcgcattgctgagtctcacctgcagtctatcagcaatttgaatgagaaccaggcctcagaggaggaggatgagctgggggagcttcgggagctgggttatccaagagaggaagatgaggaggaagaggaggatgatgaagaagaggaagaagaagaggacagccaggctgaagtcctgaaggtcatcaggcagtctgctgggcaaaagacaacctgtggccagggtctggaagggccctgggagcgcccaccccctctggatgagtccgagagagatggaggctctgaggaccaagtggaagacccagcactaagtgagcctggggaggaacctcagcgcccttccccctctgagcctggcacatag

SEQ ID NO: 705 - DNA, 1314 bp, Homo Sapiens
atggccttggccggggcccctgcgggcggcccatgcgcgccggcgctggaggccctgctcggggccggcgcgctgcggctgctcgactcctcgcagatcgtcatcatctccgccgcgcaggacgccagcgccccgccggctcccaccggccccgcggcgcccgccgccggcccctgcgaccctgacctgctgctcttcgccacaccgcaggcgccccggcccacacccagtgcgccgcggcccgcgctcggccgcccgccggtgaagcggaggctggacctggaaactgaccatcagtacctggccgagagcagtgggccagctcggggcagaggccgccatccaggaaaaggtgtgaaatccccgggggagaagtcacgctatgagacctcactgaatctgaccaccaagcgcttcctggagctgctgagccactcggctgacggtgtcgtcgacctgaactgggctgccgaggtgctgaaggtgcagaagcggcgcatctatgacatcaccaacgtccttgagggcatccagctcattgccaagaagtccaagaaccacatccagtggctgggcagccacaccacagtgggcgtcggcggacggcttgaggggttgacccaggacctccgacagctgcaggagagcgagcagcagctggaccacctgatgaatatctgtactacgcagctgcgcctgctctccgaggacactgacagccagcgcctggcctacgtgacgtgtcaggaccttcgtagcattgcagaccctgcagagcagatggttatggtgatcaaagcccctcctgagacccagctccaagccgtggactcttcggagaactttcagatctcccttaagagcaaacaaggcccgatcgatgttttcctgtgccctgaggagaccgtaggtgggatcagccctgggaagaccccatcccaggaggtcacttctgaggaggagaacagggccactgactctgccaccatagtgtcaccaccaccatcatctcccccctcatccctcaccacagatcccagccagtctctactcagcctggagcaagaaccgctgttgtcccggatgggcagcctgcgggctcccgtggacgaggaccgcctgtccccgctggtggcggccgactcgctcctggagcatgtgcgggaggacttctccggcctcctccctgaggagttcatcagcctttccccaccccacgaggccctcgactaccacttcggcctcgaggagggcgagggcatcagagacctcttcgactgtgactttggggacctcacccccctggatttctga

SEQ ID NO: 706 - DNA, 510 bp, Homo Sapiens
atgaacacattgcaggggccagtgtcattcaaagatgtggctgtggatttcacccaggaggagtggcggcaactggaccctgatgagaagatagcatacggggatgtgatgttggagaactacagccatctagtttctgtggggtatgattatcaccaagccaaacatcatcatggagtggaggtgaaggaagtggagcagggagaggagccgtggataatggaaggtgaatttccatgtcaacatagtccagaacctgctaaggccatcaaacctattgatcggaagtcagtccatcagatttgctctgggccagtggtactgagtctaagcactgcagtgaaggagttagtagaaaacagtctggatgctggtgccactaatattgatctaaagcttaaggactatggagtggatctcattgaagtttcagacaatggatgtggggtagaagaagaaaactttgaaggcttaacgatgtcaccatttctacctgccacgcgtcggtga

SEQ ID NO: 707 - DNA, 1104 bp, Homo Sapiens
atgagctctccgccgcccgcccgcagtggcttttaccgccaggaggtgaccaagacggcctgggaggtgcgcgccgtgtaccgggacctgcagcccgtgggctcgggcgcctacggcgcggtgtgctcggccgtggacggccgcaccggcgctaaggtggccatcaagaagctgtatcggcccttccagtccgagctgttcgccaagcgcgcctaccgcgagctgcgcctgctcaagcacatgcgccacgagaacgtgatcgggctgctggacgtattcactcctgatgagaccctggatgacttcacggacttttacctggtgatgccgttcatgggcaccgacctgggcaagctcatgaaacatgagaagctaggcgaggaccggatccagttcctcgtgtaccagatgctgaaggggctgaggtatatccacgctgccggcatcatccacagagacctgaagcccggcaacctggctgtgaacgaagactgtgagctgaagatcctggacttcggcctggccaggcaggcagacagtgagatgactgggtacgtggtgacccggtggtaccgggctcccgaggtcatcttgaattggatgcgctacacgcagacggtggacatctggtctgtgggctgcatcatggcggagatgatcacaggcaagacgctgttcaagggcagcgaccacctggaccagctgaaggagatcatgaaggtgacggggacgcctccggctgagtttgtgcagcggctgcagagcgatgaggccaagaactacatgaagggcctccccgaattggagaagaaggattttgcctctatcctgaccaatgcaagccctctggctgtgaacctcctggagaagatgctggtgctggacgcggagcagcgggtgacggcaggcgaggcgctggcccatccctacttcgagtccctgcacgacacggaagatgagccccaggtccagaagtatgatgactcctttgacgacgttgaccgcacactggatgaatggaagcgtgttacttacaaagaggtgctcagcttcaagcctccccggcagctgggggccagggtctccaaggagacgcctctgtga

SEQ ID NO: 708 - DNA, 2043 bp, Homo Sapiens
atggagtcttccagttcatctaactcttatttctccgttggcccaaccagtcccagcgctgtcgtgctcctctactcgaaggagctcaaaaagtgggatgagtttgaagatattttagaagagaggaggcatgtcagtgacttgaaatttgcaatgaaatgctacacacctcttgtctataagggaattactccatgtaaaccaattgatattaaatgtagtgttctcaattctgaggagattcattatgtcattaaacagctttccaaggaatcccttcaatctgtggatgtcctccgagaggaagtgagtgagatcttagatgaaatgagtcacaaactgcgtcttggagccattcggttttgtgccttcaccctgagcaaagtatttaaacaaattttctcgaaggtgtgtgtaaatgaagaaggtattcagaaactacaaagagccatccaggagcatcctgttgttctgctgcctagtcatcgaagttacattgacttcctcatgttgtcttttcttctatacaattatgatttgcctgtgccagttatagcagcaggaatggacttcctgggaatgaaaatggttggtgagctgctacgaatgtcgggtgcctttttcatgcggcgtacctttggtggcaataaactctactgggctgtattctctgaatatgtaaaaactatgttacggaatggttatgctcctgttgaatttttcctcgaagggacaagaagccgctctgccaagacattgactcctaaatttggtcttctgaatattgtgatggagccattttttaaaagagaagtttttgatacctaccttgtcccaattagtatcagttatgataagatcttggaagaaactctttatgtgtatgagcttctaggggttcctaaaccaaaagagtctacaactgggttgctgaaagccagaaagattctctctgaaaattttggaagcatccatgtgtactttggagatcctgtgtcacttcgatctttggcagctgggaggatgagtcggagctcatataacttggttccaagatacattcctcagaaacagtctgaggacatgcatgcctttgtcactgaagttgcctacaaaatggagcttctgcaaattgaaaacatggttttgagcccctggaccctaatagttgctgttctgcttcagaaccggccatccatggactttgatgctctggtggaaaagactttatggctaaaaggcttaacccaggcatttggagggtttctcatttggcctgataataaacctgctgaagaagttgtcccggccagcattcttctgcattccaacattgccagccttgtcaaagaccaggtgattctgaaagtggactccggagactcggaagtggtcgatgggcttatgctccagcacatcactctcctcatgtgctcagcttataggaaccagctgctcaacatttttgtgcgcccatccttagtagcagtagcattgcagatgacaccagggttcaggaaagaggatgtctacagttgctttcgcttcctacgtgatgtttttgcagatgagttcatcttccttccaggaaacacactaaaggactttgaagaaggctgttacctgctttgtaaaagtgaagccatacaagtgactacgaaagacatcctagttacagagaaaggaaatactgtgttagaatttttagtaggactctttaaaccttttgtggaaagctatcagataatttgcaagtaccttttgagtgaagaagaggaccacttcagtgaggaacagtacttggctgcagtcagaaaattcacaagtcagcttctcgatcaaggtacctctcaatgttatgatgtattatcttctgatgtgcagaaaaacgccttagcagcctgtgtgaggctcggagtagtggagaagaagaagataaataataactgtatatttaatgtgaatgaacctgccacaaccaaattagaagaaatgcttggttgtaagacaccaataggaaaaccagccactgcaaaactttaa

SEQ ID NO: 709 - DNA, 1920 bp, Homo Sapiens
atggagcccgcgatggagccggagactctggaggcgcgaatcaatagagccacgaaccccctgaacaaggagctcgactgggccagcatcaacggcttctgcgagcagctcaacgaggactttgaggggcctccactcgccacccggctgctggcccacaagatccagtccccacaggagtgggaggcgatccaggccttgacggtgctggaaacatgcatgaagagctgcggcaagcggttccacgacgaagtgggcaagttccgctttctcaacgagctcatcaaggtcgtgtctcccaagtatctgggctctcggacatcggagaaggtgaagaacaagatcttggagctcctctacagctggacagtgggcctgcccgaggaggtgaaaatcgcagaggcctaccagatgctaaagaagcaggggattgtaaagtccgaccccaagcttccagatgacactacctttccccttcctcctccacggccgaagaatgtgatctttgaagatgaggagaaatccaagatgctggcccgcctgctgaagagctcccatcccgaagacctccgcgcagccaataagctcatcaaagagatggtgcaggaggaccagaagcggatggagaagatctcgaagagggtgaatgccatcgaggaggtgaacaacaatgtgaaactgctcacggagatggtgatgagccacagccagggcggcgcagcagctggcagcagcgaggacctcatgaaggaactgtaccagcgctgtgagcggatgcggcccacgctcttccgactggcgagtgacacagaggacaatgatgaggccttagcggagatcctgcaggccaatgacaacctcacccaggtgatcaacctgtataagcagctggtgcggggtgaggaggtcaacggtgatgccacagccggctccatccctgggagcacctcggccctgctggatctctcaggcctggatctcccgcctgcgggcaccacctacccagctatgcccacccgccctggcgagcaggccagccctgagcagcccagtgcctcagtttccctgcttgacgacgagctcatgtctctgggcctcagtgaccccacacccccttcaggcccaagcctggatggtaccggatggaacagcttccagtcgtcggatgccactgagcccccagcccctgctctggcccaggcccccagtatggaaagccgacccccagcgcagacatccctgccagcaagcagcggtctggacgacctagacctcctggggaagaccctcctgcagcagtcgctgcccccggaatcccagcaagtgcggtgggagaagcagcagccaaccccccggctcacactccgggacctgcagaataagagcagcagctgcagctcccccagctccagcgccaccagccttctccacaccgtgtccccagagccccccaggcctccgcagcagcccgtaccaaccgagctctcactggccagcatcactgtgcccctggagtccatcaaacccagcaacatcctgcccgtgactgtgtatgaccagcacggcttccgcatcctcttccattttgcccgggacccactgccagggcgctccgacgtgctggtggtggtggtttccatgctgagcaccgccccccagcccatccgcaacatcgtgttccagtcagctgtccccaaggttatgaaggtgaagctgcagccaccctcgggcacggagctgccagcttttaaccccatcgtccacccctcagcaatcacccaggtcctgctgcttgccaacccccagaaggagaaggttcgcctccgctacaagctcaccttcaccatgggtgaccagacctacaacgagatgggggatgtggaccagttccccccacctgaaacctggggtagcctctag

SEQ ID NO: 710 - DNA, 1932 bp, Homo Sapiens
atggctgaaggcgagttgaaggatatggaacagttttttgatgacctttcagattctttctctggaactgaaccagaggttcacaaaacaagtgtagtaggtttgtttctgcgtcacatgatcttggcctacagtaagctttctttcagccaagtgtttaaactgtacactgcccttcagcagtacttccagaatggtgagaaaaagacagtggaggatgctgatatggaactgaccagtagagatgagggtgaaagaaaaatggaaaaagaagaacttgatgtatctgtaagagaagaggaggtatcttgcagtgggcctctgtcccaaaaacaagcagaattttttctttctcaacaggcttctttgctaaagaatgatgagactaaggccctcactccagcttccttgcagaaggaattaaacaatttgttgaaatttaatcctgattttgctgaagcgcattatctcagctacttaaacaacctccgtgtccaagatgttttcagttcaacacacagtctcctccattattttgatcgtctgattcttaccggagccgaaagcaaaagtaatggggaagagggctatggccggagcttgagatacgccgctctgaatcttgccgccctgcactgccgcttcggtcactatcaacaggcagagctcgccctgcaggaggcaattaggattgcccaggagtccaacgatcacgtgtgtctccagcactgtttgagctggctttatgtgctggggcagaagagatccgatagctatgttctgctggagcattctgtgaagaaggcagtacattttgggttaccgagagcttttgctgggaagacggcaaacaagctgatggatgccctaaaggactccgacctcctgcactggaaacacagcctgtcagagctcatcgatatcagcatcgcacagaaaacggccatctggaggctgtatggccgcagcaccatggcactgcaacaggcccagatgttgctgagcatgaacagcctggaggcggtgaatgcgggcgtgcagcagaacaacacagagtcctttgctgtcgcactctgccacctcgcagagctacacgcggagcagggctgttttgctgcagcttctgaagtgttaaagcacttgaaggaacgatttccgcctaatagtcagcacgcccagttatggatgctatgtgatcaaaaaatacagtttgacagagcaatgaatgatggcaaatatcatttggctgattcacttgttacaggaatcacagctctcaatagcatagagggtgtttataggaaagcggttgtattacaagctcagaaccaaatgtcagaggcacataagcttttacaaaaattgttggttcattgtcagaaactgaagaacacagaaatggtgatcagtgtcctactgtccgtggcagagctgtactggcgatcttcctcccctaccatcgcgctgcccatgctcctgcaggctctggccctctccaaggagtaccggttacagtacttggcctctgaaacagtgctgaacttggcttttgcgcagctcattcttggaatcccagaacaggccttaagtcttctccacatggccatcgagcccatcttggctgacggggctatcctggacaaaggtcgtgccatgttcttagtggccaagtgccaggtggcttcagcagcttcctacgatcagccgaagaaagcagaagctctggaggctgccatcgagaacctcaatgaagccaagaactattttgcaaaggttgactgcaaagagcgcatcagggacgtcgtttacttccaggccagactctaccataccctggggaagacccaggagaggaaccggtgtgcgatgctcttccggcagctgcatcaggagctgccctctcatggggtacccttgataaaccatctctag

SEQ ID NO: 711 - DNA, 870 bp, Homo Sapiens
atgccggtcgtccggaagattttccgtcgccgccggggcgactcggagtcagaggaagatgagcaggactcagaggaggttcgattaaaactggaagagaccagagaggtacagaacttgaggaagaggcccaacggggtgagtgctgtggccttgctggtgggagagaaggtacaagaggagaccactctagtggatgatccctttcagatgaagacaggtggtatggtggatatgaagaaactgaaggaaaggggcaaagataagatcagtgaggaggaggacctgcacctggggacatcgttttctgcagaaaccaaccgaagggatgaggatgcagacatgatgaagtacattgagacagagctaaagaagaggaaagggatcgtggaacatgaggaacagaaagttaagccaaagaatgcagaggactgtctttatgaacttccagaaaacatccgtgtttcctcagcaaagaagaccgaggagatgctttccaaccagatgctgagtggcattcctgaggtggacctgggcatcgatgctaaaataaaaaatatcatttccacggaggatgccaaggcccgtctgctggcagagcagcagaacaagaagaaagacagcgagacctccttcgtgcctaccaacatggctgtgaattatgtgcagcacaacagattttatcatgaggagctcaacgcgcccatacggagaaacaaagaagagcccaaggcccggcccttgagagtaggtgacacggagaagccagagcctgagcggtcccctcctaaccgcaagcgtcctgctaacgagaaggcaactgatgactatcattatgagaagttcaagaaaatgaataggcggtactga

SEQ ID NO: 712 - DNA, 984 bp, Homo Sapiens
atggaggtggcggtgcccgtgaagcaggaggccgagggcctggcgctggactccccgtggcaccgcttccgccgcttccacctgggcgacgcgccgggcccgcgggaggcgctggggctgctccgcgccctgtgccgggactggctgcggcccgaggtgcacaccaaggagcagatgttggagctgctggtgctggaacagttcctgagcgcgctgcccgccgacacgcaggcctgggtgtgcagccggcagccgcagagcggggaggaggcggtggccctgctggaggagctctgggggccagcagcctcccccgatgggtcgtcagcaacgagggtgcctcaggatgtgacgcagggccctggggccacaggtggaaaggaggacagtgggatgattcccttagcaggcaccgcccctggggctgaggggccggcgcctggggactcccaggctgtgcgcccctacaagcaggagcccagcagccccccgctggcgcctggcctgcccgccttcctagcggccccgggcaccacgtcctgccccgagtgcggcaaaacgtccctgaaaccagctcacctgctgcgccaccggcagagccactcgggcgagaagccgcacgcctgccctgagtgcgggaaggcctttcggcgcaaggagcacctgcggcgccaccgcgacacgcaccccggcagccccggcagccccgggcccgcgctgcgccctctgcccgcccgtgagaagccccacgcgtgctgcgagtgtggcaagaccttctactggcgcgagcacctggtgcgccaccgcaagacgcactcgggagcgcggccctttgcctgctgggagtgtggcaagggcttcgggcgccgcgagcacgtgctgcgccaccagcgcatccacggccgggcagcggccagcgcgcagggggcggtagctccgggcccggatggtggaggccccttcccgccctggcccttgggttag

SEQ ID NO: 713 - DNA, 378 bp, Homo Sapiens
atggagtccaaagagaaacgagcagtaaacagtctcagcatggaaaatgccaaccaagaaaatgaagaaaaggagcaagttgctaataaaggggagcccttggccctccctttggatgctggtgaatactgtgtgcctagaggaaatcgtaggcggttccgcgttaggcagcccatcctgcagtatagatgggatatgatgcataggcttggagaaccacaggcaaggatgagagaagagaatatggaaaggattggggaggaggtgagacagctgatggaaaagctgagggaaaagcagttgagtcatagtctgcgggcagtcagcactgacccccctcaccatgaccatcatgatgagttttgccttatgccctga

SEQ ID NO: 714 - DNA, 3879 bp, Homo Sapiens
atggcggatcccgcagcccccacgcccgcagctcccgctccagcccaggccccggctccagccccggaggcagtcccggccccagccgcagcccccgtcccggcgccggcgcccgcctcggactcggcctccgggccgtcctcggactccggcccagaagccggctcgcagcgcctgctgttttctcacgacctggtgtcgggccgttaccgtggctccgtgcacttcgggctggtgcgcctcatccacggcgaggactcggactcggagggcgaggaggagggccgcgggagctcggggtgctccgaggccgggggcgcgggccacgaggagggccgggccagccccctgcgccgcggctacgtgcgcgtccagtggtacccggagggcgtcaagcagcatgtgaaggagaccaagctgaaactagaggaccgttctgtggtgccccgagatgtggtccggcacatgcgatccaccgacagtcagtgtggcacggtgatcgacgtcaacatcgactgtgccgtcaagctcatcggcaccaactgcatcatctatcccgtcaacagcaaggacctgcagcacatctggcccttcatgtatggggactacattgcctatgactgctggctggggaaggtctacgacttgaagaaccagatcatcctgaagctatccaacggcgccaggtgctccatgaacacggaagatggcgccaagctctacgacgtctgcccgcacgtcagcgactcgggtctcttcttcgatgattcctatggcttctacccaggccaggtgctcattggccctgccaagatcttctccagcgtccagtggctgtcaggtgtcaagcccgtgctcagcaccaagagcaagttccgagtggtggtggaagaggtgcaggttgtagagttgaaagttacatggattaccaagagtttctgtccagggggcacggacagcgtcagccccccaccctctgtcatcacccaggaaaacctaggcagggtgaagcgtctcggatgctttgaccatgctcagcggcagcttggggagcgctgtctgtatgtcttcccagccaaggtagagccagccaagattgcctgggaatgtccagaaaaaaactgcgcccagggggagggctctatggccaagaaggtgaagcgcctgttgaagaagcaggttgtgcggatcatgtcatgctccccagacacccagtgttcccgggaccattccatggaagacccagacaagaagggggaatccaaaaccaagagcgaagcggagtctgccagccctgaggagacgcccgatggctctgccagtccagtggagatgcaggacgagggtgcagaggagccccacgaggcaggagagcagctgcccccattcctgctaaaagaaggcagagatgacaggctgcactcggcagagcaggacgcagatgatgaggctgctgatgacacggacgacaccagttcggtgacctcctctgccagctccaccacttcctcccagagcggcagcggcacgagtcgcaaaaagagcatccccttgtccatcaagaacttaaagcgcaaacacaagaggaagaagaataaaatcactcgagacttcaagccaggggacagggtggcagtggaggtggtgaccacgatgacctcagccgacgtgatgtggcaggatggctccgtggaatgcaacatccgctccaacgacctcttccctgtgcaccacctggacaacaacgagttctgccctggagacttcgtggtagataagcgagtccagagctgtccagaccctgctgtctacggtgtggtacagtctggggaccacatcggccgtacctgcatggtgaagtggttcaagctgaggccgagtggggacgacgtggagctgattggagaagaggaagatgtgagtgtttacgacattgctgaccaccctgactttaggttccgtacaactgacatcgtcatccgcatcggcaatactgaggatggggctcctcacaaggaggatgagccatcggtgggccaggtggcccgtgtggacgtcagcagcaaggtggaggtggtgtgggctgacaactcaaagaccatcatcctgccccagcacttgtacaacatagagtctgagattgaggagtcagactacgattcggtagaaggcagcaccagcggggcatcctcggatgaatgggaagatgatagtgacagctgggagacggacaatgggctggtggaggacgagcaccccaagatagaggagccccccatcccacccctggagcagccggtggcccctgaggacaagggagtggtgatcagtgaagaggcagccacagctgccgtccagggggctgtggccatggctgcccccatggccgggctgatggagaaggctggcaaggacgggccacccaagagcttccgggagttgaaagaggccatcaagatcctggagagcctcaagaacatgactgtggagcagctgctgacgggctcgcccacctctccgactgtggagcctgagaagccaactcgggagaagaagtttctggatgacatcaagaagctacaggaaaacctcaagaagaccctggacaatgtggccattgtagaggaggagaagatggaagcagtgcccgacgtagagcgcaaggaggacaagcccgaggggcagtcacctgtgaaggctgagtggcccagcgaaaccccggtgctgtgccagcagtgtggcggcaagcctggcgtcaccttcaccagcgccaagggcgaggtcttctccgtactggagtttgcaccctcaaatcattcttttaagaaaattgagttccagcctccagaagccaagaagttcttcagcacagtgcggaaggagatggcgctgctggctacctcactgcctgagggcatcatggtcaagacttttgaagatagaatggacctcttctcagctctcatcaagggccccactcgaaccccctacgaggatggcctctacttgtttgacatccagctccccaacatctacccagccgtgcccccccacttctgctacctctcccaatgcagtggccgcctgaaccccaacctgtatgacaatgggaaggtgtgtgtcagcctcctgggcacctggattggaaaggggacagagaggtggacaagcaagtccagccttctccaggtgctcatctccatccaaggtctgatcctggtaaatgaaccatactacaacgaagccggcttcgacagtgaccgaggcctgcaggaaggctatgaaaacagtcgctgttacaatgagatggcgctgatccgcgtggtgcagtccatgacccagctggtgcggcggccccccgaggtctttgagcaggagatcaggcaacactttagcactggtggctggcggctggtgaaccgtatcgagtcctggctggaaacccatgccctgctggagaaggcccaggcactgcccaacggggtgcccaaggccagcagctcgccagagcccccagctgtagccgagctgtcagactccggccaacaagaacctgaggatggagggccagccccaggagaggcctcccagggctcagactcagagggcggtgcccagggcctggcctcagctagcagggaccacacagaccagacttcggagaccgcaccagacgcatcggtgccacccagtgtgaaaccaaagaagcggagaaagagctaccggagcttcttacctgagaagagtggctaccctgacatcggcttccccctcttcccactttccaagggtttcatcaagagcatccggggtgtcctgacgcagttccgggctgccctgctagaggcaggcatgccggagtgcacagaggacaagtag

SEQ ID NO: 715 - DNA, 795 bp, Homo Sapiens
atggcaggggaacagaaaccctcaagtaatctcctggagcagtttattttactagccaaaggtaccagtggctcagccctcactgctctcataagccaggtcttagaggctcccggagtgtatgtctttggagaacttctggagctggccaacgtgcaggagcttgcggaaggagctaatgctgcttatttgcagttgttgaacctgtttgcctatgggacatacccagattacatagccaacaaggagagcctgccagaactgagcacagctcagcagaacaagctgaagcatcttaccatcgtgagcttggcatcaagaatgaagtgtatcccctactccgtgttgctgaaagacctggagatgcggaatctccgggaactagaagaccttatcattgaggctgtctacactgacatcatccagggcaagctggaccagcgaaaccagctgctggaagtggatttctgcattggccgtgacatccgaaagaaggatatcaataatattgtcaagaccctgcatgaatggtgtgatggctgtgaagcagttctactgggcatcgagcagcaagttctgagagccaaccagtacaaagagaaccacaaccgaactcagcagcaggtagaagcagaggttaccaacatcaagaagacactcaaagccaccgcatcctcctcggctcaggagatggagcagcagctggctgaacgggagtgtccccctcacgctgagcagaggcagcccaccaagaagatgtccaaagtgaaaggtctggtctccagccgccactag

SEQ ID NO: 716 - DNA, 1203 bp, Homo Sapiens
atggccgcgaattattccagtaccagtacccggagagaacatgtcaaagttaaaaccagctcccagccaggcttcctggaacggctgagcgagacctcgggtgggatgtttgtggggctcatggccttcctgctctccttctacctaattttcaccaatgagggccgcgcattgaagacggcaacctcattggctgaggggctctcgcttgtggtgtctcccgacagcatccacagtgtggctccggagaatgaaggaaggctggtgcacatcattggcgccttacggacatccaagcttttgtctgatccaaactatggggtccatcttccggctgtgaaactgcggaggcacgtggagatgtaccaatgggtagaaactgaggagtccagggagtacaccgaggatgggcaggtgaagaaggagacgaggtattcctacaacactgaatggaggtcagaaatcatcaacagcaaaaacttcgaccgagagattggccacaaaaaccccagtgccatggcagtggagtcattcatggcaacagccccctttgtccaaattggcaggtttttcctctcgtcaggcctcatcgacaaagtcgacaacttcaagtccctgagcctatccaagctggaggaccctcatgtggacatcattcgccgtggagactttttctaccacagcgaaaatcccaagtatccagaggtgggagacttgcgtgtctccttttcctatgctggactgagcggcgatgaccctgacctgggcccagctcacgtggtcactgtgattgcccggcagcggggtgaccagctagtcccattctccaccaagtctggggataccttactgctcctgcaccacggggacttctcagcagaggaggtgtttcatagagaactaaggagcaactccatgaagacctggggcctgcgggcagctggctggatggccatgttcatgggcctcaaccttatgacacggatcctctacaccttggtggactggtttcctgttttccgagacctggtcaacattggcctgaaagcctttgccttctgtgtggccacctcgctgaccctgctgaccgtggcggctggctggctcttctaccgacccctgtgggccctcctcattgccggcctggcccttgtgcccatccttgttgctcggacacgggtgccagccaaaaagttggagtga

SEQ ID NO: 717 - DNA, 813 bp, Homo Sapiens
atgggcaataccagcagtgagcgcgccgcgctggagcggcatggtggccataagacgccccggagggacagctcggggggcaccaaggacggggacaggcccaagatcctgatggacagccccgaagacgccgacctcttccactccgaggaaatcaaggcaccagagaaggaggaattcctggcctggcagcatgatctggaagtgaatgataaagctcccgcccaggctcggccaacggtgtttcgatggacggggggcggaaaggaagtttacttatctgggtccttcaacaactggagtaaacttcccctcaccagaagccacaataactttgtagccatcctggatctgccggaaggagagcatcagtacaagttctttgtggatggtcagtggacgcacgacccttccgagcccatagtaaccagccagcttggcacagttaacaacatcattcaagtgaagaaaactgactttgaagtatttgatgctttaatggtggattcccaaaagtgctccgatgtgtctgagctgtccagttctcccccaggaccctaccatcaggagccctacgtctgcaaacccgaagagcgctttcgggcaccccctattctccccccacatctcctccaggtcatcctgaacaaggacacggggatttcctgtgatccagctttgcttcctgagcccaatcacgtcatgctgaaccacctatacgcgctgtctatcaaggatggagtgatggtgctcagcgcaacccaccggtacaagaagaagtacgtcaccaccttgttatacaagcccatatga

SEQ ID NO: 718 - DNA, 1002 bp, Homo Sapiens
atgtctggggacgagatgatttttgatcctactatgagcaagaagaaaaagaagaagaagaagccttttatgttagatgaggaaggggatacccaaacagaggaaacccagccttcagaaacaaaagaagtggagccagagccaactgaggacaaggatttggaagctgatgaagaggacactaggaaaaaagatgcttctgatgatctagatgacttgaacttctttaatcaaaagaaaaagaagaaaaaaactaaaaagatatttgatattgatgaagctgaagaaggtgtaaaggatcttaagattgaaagtgatgttcaagaaccaactgaaccagaggatgaccttgacattatgcttggcaataaaaagaagaaaaagaagaatgttaagttcccagatgaggatgaaatactagagaaagatgaagctctagaagatgaagacaacaaaaaagatgatggtatctcattcagtaatcagacaggccctgcttgggcaggctcagaaagagactacacatacgaggagctgctgaatcgagtgttcaacatcatgagggaaaagaatccagatatggttgctggggagaaaaggaaatttgtcatgaaacctccacaagtcgtccgagtaggaaccaagaaaacttcttttgtcaactttacagatatctgtaaactattacatcgtcagcccaaacatctccttgcatttttgttggctgaattgggtacaagtggttctatagatggtaataaccaacttgtaatcaaaggaagattccaacagaaacagatagaaaatgtcttgagaagatatatcaaggaatatgtcacttgtcacacatgccgatcaccggacacaatcctgcagaaggacacacgactctatttcctacagtgcgaaacttgtcattctagatgttctgttgccagtatcaaaaccggcttccaggctgtcacgggcaagcgagcacagctccgtgccaaagctaactaa

SEQ ID NO: 719 - DNA, 921 bp, Homo Sapiens
atggacactcccccgctctcggattcggagtcggaatccgatgaatcccttgtcacagacagagagttgcaggatgcgttttcccgagggcttctgaagccaggcctcaatgtcgtgctagaggggccgaagaaggccgtgaacgacgtgaatggcctgaagcaatgtttggcagaattcaagcgggatctggaatgggttgaaaggctcgatgtgacactgggtccggtaccggagatcggtggatctgaggcgccagcacctcagaacaaggaccagaaagctgttgatccagaagacgacttccagcgagagatgagtttctatcgccaagcccaggccgcagtgcttgcagtcttaccccgcctccatcagctcaaagtccctacgaagcgacccactgattattttgcggaaatggccaaatctgatctgcagatgcagaagattcgacagaagctgcagactaaacaggctgccatggagaggtctgaaaaagctaagcaactgcgagcacttaggaaatacgggaagaaggtgcaaacggaggttcttcagaagaggcagcaggagaaagcccatatgatgaatgctattaagaaatatcagaaaggcttctctgataaactggatttccttgagggagatcagaaacctctggcacagcgcaagaaggcaggagccaaaggccagcagatgaggaaggggcccagtgctaaacgacggtataaaaaccagaagtttggttttggtggaaagaagaaaggctcaaagtggaacactcgggagagctatgatgatgtatctagcttccgggccaagacagctcatggcagaggcctcaagaggcctggcaagaaagggtcaaataagagacctggaaaacgaacaagagagaagatgaagaacagaacacactaa

SEQ ID NO: 720 - DNA, 1050 bp, Homo Sapiens
atggcgcaccaaacgggcatccacgccacggaagagctgaaggaattctttgccaaggcacgggctggctctgtgcggctcatcaaggttgtgattgaggacgagcagctcgtgctgggtgcctcgcaggagccagtaggccgctgggatcaggactatgacagggccgtgctgccactgctggacgcccagcagccctgctacctgctctaccgcctcgactcacagaatgctcagggcttcgaatggctcttcctcgcctggtcgcctgataactcccccgtgcggctgaagatgctgtacgcggccacgcgggccacagtgaaaaaggagtttggaggtggccacatcaaggatgagctcttcgggactgtgaaggatgacctctcttttgctgggtaccagaaacacctgtcgtcctgtgcggcacctgccccgctgacctcggctgagagagagctccagcagatccgcattaacgaggtgaagacagagatcagtgtggaaagcaagcaccagaccctgcagggcctcgccttccccctgcagcctgaggcccagcgggcactccagcagctcaagcagaaaatggtcaactacatccagatgaagctggacctagagcgggaaaccattgagctggtgcacacagagcccacggatgtggcccagctgccctcccgggtgccccgagatgctgcccgctaccacttcttcctctacaagcacacccatgagggcgacccccttgagtctgtagtgttcatctactccatgccggggtacaagtgcagcatcaaggagcgaatgctctactccagctgcaagagccgcctcctcgactccgtggagcaggacttccatctggagatcgccaagaaaattgagattggcgatggggcagagctgacggcagagttcctctacgacgaggtgcaccccaagcaacacgccttcaagcaggccttcgccaagcccaagggcccagggggcaagcggggccataagcgcctcatccgcggcccgggtgaaaatggggatgacagctag

SEQ ID NO: 721 - DNA, 1713 bp, Homo Sapiens
atggcgggcggggcccgggaggtgctcacactgcagttgggacattttgccggtttcgtgggcgcgcactggtggaaccagcaggatgctgcgctgggccgagcgaccgattccaaggagcccccgggagagctgtgccccgacgtcctgtatcgtacgggccggacgctgcacggccaggagacctacacgccgcgactcatcctcatggatctgaagggtagtttgagctccctaaaagaggaaggtggactctacagggacaaacagttggatgctgcaatagcatggcaggggaagctcaccacacacaaagaggaactctatcccaagaacccttatctccaagactttctgagtgcagagggagtgctgagtagtgatggtgtctggagggtcaaatccattcccaatggcaaaggttcctcaccactccccaccgctacaactccaaaaccacttatccctacagaggccagcatcagggtctggtcagacttcctcagagtccatctccatccccggagcatctgtatgattcagaagtacaaccacgatggggaagcaggtcggctggaggcttttggccaaggggaaagtgtcctaaaggaacccaagtaccaggaagagctggaggacaggctgcatttctacgtggaggaatgtgactacttgcagggcttccagatcctgtgtgacctgcacgatggcttctctggggtaggcgcgaaggcggcagagctgctacaagatgaatattcagggcggggaataataacctggggcctgctacctggtccctaccatcgtggggaggcccagagaaacatctatcgtctattaaacacagcttttggtctcgtgcacctgactgctcacagctctcttgtctgccccttgtccttgggtgggagcctgggcctgcgacccgagccacctgtcagcttcccttacctgcattatgatgccactctgcccttccactgcagtgccatcctggctacagccctggacacagtcactgttccttatcgcctgtgttcctctccagtttccatggttcatctggctgacatgctgagcttctgtgggaaaaaggtggtgacagcaggagcaatcatccctttccccttggctccaggccagtcccttcctgattccctgatgcagtttggaggagccaccccatggaccccactgtctgcatgtggggagccttctggaacacgttgctttgcccagtcagtggtgctgaggggtatagacagagcatgccacacaagccagctcaccccagggacacctccaccctctgcccttcatgcatgtaccactggggaagaaatcttggctcagtatttacaacagcagcagcctggagtcatgagttcttcccatctgctgctgactccctgcagggtggctcctccttacccccacctcttctcaagctgcagtccaccgggtatggttctggatggttcccccaagggagcagcagtggagagcatcccagtgtttggggcactgtgttcctcttcgtccctgcaccagaccctggaagccttggccagagacctcaccaaactcgacttgcggcgctgggccagcttcatggatgctggagtggagcacgatgacgtagcagagctgctgcaggagctacaaagcctggcccagtgctaccagggtggtgacagcctcgtggactaa

SEQ ID NO: 722 - DNA, 1338 bp, Homo Sapiens
atgctcccctggacggcgctcggcctggccctgagcttgcggctggcgctggcgcggagcggcgcggagcgcggtccaccagcatcagccccccgaggggacctgatgttcctgctggacagctcagccagcgtctctcactacgagttctcccgggttcgggagtttgtggggcagctggtggctccactgcccctgggcaccggggccctgcgtgccagtctggtgcacgtgggcagtcggccatacaccgagttccccttcggccagcacagctcgggtgaggctgcccaggatgcggtgcgtgcttctgcccagcgcatgggtgacacccacactggcctggcgctggtctatgccaaggaacagctgtttgctgaagcatcaggtgcccggccaggggtgcccaaagtgctggtgtgggtgacagatggcggctccagcgaccctgtgggcccccccatgcaggagctcaaggacctgggcgtcaccgtgttcattgtcagcaccggccgaggcaacttcctggagctgtcagccgctgcctcagcccctgccgagaagcacctgcactttgtggacgtggatgacctgcacatcattgtccaagagctgaggggctccattctcgacgcgatgcggccgcagcagctccatgccacggagatcacgtccagcggcttccgcctggcctggccacccctgctgaccgcagactcgggctactatgtgctggagctggtgcccagcgcccagccgggggctgcaagacgccagcagctgccagggaacgccacggactggatctgggccggcctcgacccggacacggactacgacgtggcgctagtgcctgagtccaacgtgcgcctcctgaggccccagatcctgcgggtgcgcacgcggcccggtgaggcagggccgggggcttcgggcccggagtcgggggctgggccggcccccacgcagctcgccgccctccccgccccagaggaggccgggccagagcgcatcgtcatctcccacgcccggccgcgcagcctccgcgtgagttgggccccagcgctgggctcagccgcggcgctcggctaccacgtgcagttcgggccgctgcggggcggggaggcgcagcgggtggaggtgcccgcgggccgcaactgcaccacgctgcagggcctggcgccgggcaccgcctacctggtgaccgtgaccgccgccttccgctcgggccgcgagagcgcgctgtccgccaaggcctgcacgcccgacggcccgcgcccgcgcccacgccccgtgccccgcgccccgaccccggggaccgccagccgtgagccgtaa

SEQ ID NO: 723 - DNA, 1614 bp, Homo Sapiens
atgttggctcgggagacgtacgaggaggaccgggagtacgagagccaggccaagcgtctcaagaccgaggagggggagatcgactactcggccgaggaaggcgagaaccgccgggaagcgacgccccggggcgggggcgatggcggcggcggcggccggagcttctctcagccggaggcaggtggaagtcatcataaagtttctgtttcacccgtcgtccatgttcgaggactctgtgaatctgtggtggaagcagacctcgtggaagcgctggaaaaatttgggacaatatgctatgtgatgatgatgccatttaaacgacaggctctagtggaatttgaaaacatagatagtgccaaagaatgtgtgacatttgctgcagatgaacccgtgtacattgctggtcaacaggcttttttcaactattctacaagcaaaaggatcactcggccaggaaatactgatgatccatcaggaggcaacaaagttcttctgctctcaattcagaatccgctttatccaattacagtggatgttttatatactgtatgcaaccctgttggcaaagtgcaacgtattgttatattcaagagaaatgggatacaagcaatggttgagtttgaatcagtcctttgtgcccagaaagctaaagcagcactcaatggagctgatatatatgctggatgttgcacactaaaaattgaatatgcacggccaactcgtctaaatgttattaggaatgacaatgacagttgggactacactaaaccatatttgggaagacgagatagaggaaagggtcgccagagacaagccattttgggagaacacccttcttcgtttagacatgatggctatggatcccatggtccattattgcctttaccaagtcgttacagaatgggctctcgagatacacctgaacttgttgcttatccattaccacaggcttcttcctcttacatgcatggaggaaatccctctggttcagttgtaatggttagtggattacatcaactaaaaatgaattgttcaagagtcttcaacctgttctgcttatatggaaatattgagaaggtaaaatttatgaagaccattcctggtacagcactggtagaaatgggtgatgagtatgctgtagaaagagctgtcacacaccttaataatgtcaaattatttgggaaaagacttaatgtttgcgtgtctaaacaacattcagttgttccaagtcaaatatttgagctggaggatggtaccagcagctacaaagattttgcaatgagcaaaaataatcgctttacaagtgctggccaagcatctaagaatataatccagccaccctcctgtgttttgcattattataatgttccattgtgtgtcacagaagagaccttcacaaagttgtgtaatgaccatgaagttcttacattcatcaaatataaagtgtttgatgcaaaaccttcagccaaaacactttctgggctattagaatgggagtgcaaaactgatgcagtagaagcccttacggcactgaatcactatcagataagagtgccgaatggttccaatccctatacattgaagctttgcttttctacatcatcccatttataa

SEQ ID NO: 724 - DNA, 1368 bp, Homo Sapiens
atgggggcctgcctgggagcctgctccctgctcagctgcgcgtcctgcctctgcggctctgccccctgcatcctgtgcagctgctgccccgccagccgcaactccaccgtgagccgcctcatcttcacgttcttcctcttcctgggggtgctggtgtccatcattatgctgagcccgggcgtggagagtcagctctacaagctgccctgggtgtgtgaggagggggccgggatccccaccgtcctgcagggccacatcgactgtggctccctgcttggctaccgcgctgtctaccgcatgtgcttcgccacggcggccttcttcttctttttcaccctgctcatgctctgcgtgagcagcagccgggacccccgggctgccatccagaatgggttttggttctttaagttcctgatcctggtgggcctcaccgtgggtgccttctacattcctgacggctccttcaccaacatctggttctacttcggcgtcgtgggctccttcctcttcatcctcatccagctggtgctgctcatcgactttgcgcactcctggaaccagcggtggctgggcaaggccgaggagtgcgattcccgtgcctggtacgcaggcctcttcttcttcactctcctcttctacttgctgtcgatcgcggccgtggcgctgatgttcatgtactacactgagcccagcggctgccacgagggcaaggtcttcatcagcctcaacctcaccttctgtgtctgcgtgtccatcgctgctgtcctgcccaaggtccaggacgcccagcccaactcgggtctgctgcaggcctcggtcatcaccctctacaccatgtttgtcacctggtcagccctatccagtatccctgaacagaaatgcaacccccatttgccaacccagctgggcaacgagacagttgtggcaggccccgagggctatgagacccagtggtgggatgccccgagcattgtgggcctcatcatcttcctcctgtgcaccctcttcatcagtctgcgctcctcagaccaccggcaggtgaacagcctgatgcagaccgaggagtgcccacctatgctagacgccacacagcagcagcagcaggtggcagcctgtgagggccgggcctttgacaacgagcaggacggcgtcacctacagctactccttcttccacttctgcctggtgctggcctcactgcacgtcatgatgacgctcaccaactggtacaagcccggtgagacccggaagatgatcagcacgtggaccgccgtgtgggtgaagatctgtgccagctgggcagggctgctcctctacctgtggaccctggtagccccactcctcctgcgcaaccgcgacttcagctga

SEQ ID NO: 725 - DNA, 897 bp, Homo Sapiens
atgggtgatcacgcttggagcttcctaaaggacttcctggccgggggcgtcgccgctgccgtctccaagaccgcggtcgcccccatcgagagggtcaaactgctgctgcaggtccagcatgccagcaaacagatcagtgctgagaagcagtacaaagggatcattgattgtgtggtgagaatccctaaggagcagggcttcctctccttctggaggggtaacctggccaacgtgatccgttacttccccacccaagctctcaacttcgccttcaaggacaagtacaagcagctcttcttagggggtgtggatcggcataagcagttctggcgctactttgctggtaacctggcgtccggtggggccgctggggccacctccctttgctttgtctacccgctggactttgctaggaccaggttggctgctgatgtgggcaagggcgccgcccagcgtgagttccatggtctgggcgactgtatcatcaagatcttcaagtctgatggcctgagggggctctaccagggtttcaacgtctctgtccaaggcatcattatctatagagctgcctacttcggagtctatgatactgccaaggggatgctgcctgaccccaagaacgtgcacatttttgtgagctggatgattgcccagagtgtgacggcagtcgcagggctggtgtcctacccctttgacactgttcgtcgtagaatgatgatgcagtccggccggaaaggggccgatattatgtacacggggacagttgactgctggaggaagattgcaaaagacgaaggagccaaggccttcttcaaaggtgcctggtccaatgtgctgagaggcatgggcggtgcttttgtattggtgttgtatgatgagatcaaaaaatatgtctaa

SEQ ID NO: 726 - DNA, 894 bp, Homo Sapiens
atggaccctgggaaggacaaagagggggtgccccagccctcagggccgccagcaaggaagaaatttgtgatacccctcgacgaggatgaggtccctcctggagtggccaagcccttattccgatctacacagagccttcccactgtggacacctcggcccaggcggcccctcagacctacgccgaatatgccatctcacagcctctggaaggggctggggccacgtgccccacagggtcagagcccctggcaggagagacgcccaaccaggccctgaaacccggggcaaaatccaacagcatcattgtgagccctcggcagaggggcaatcccgtactgaagttcgtgcgcaatgtgccctgggaatttggcgacgtaattcccgactatgtgctgggccagagcacctgtgccctgttcctcagcctccgctaccacaacctgcacccagactacatccatgggcggctgcagagcctggggaagaacttcgccttgcgggtcctgcttgtccaggtggatgtgaaagatccccagcaggccctcaaggagctggctaagatgtgtatcctggccgactgcacattgatcctcgcctggagccccgaggaagctgggcggtacctggagacctacaaggcctatgagcagaaaccagcggacctcctgatggagaagctagagcaggacttcgtctcccgggtgactgaatgtctgaccaccgtgaagtcagtcaacaaaacggacagtcagaccctcctgaccacatttggatctctggaacagctcatcgccgcatcaagagaagatctggccttatgcccaggcctgggccctcagaaagcccggaggctgtttgatgtcctgcacgagcccttcttgaaagtaccctga

SEQ ID NO: 727 - DNA, 411 bp, Homo Sapiens
atggctcgtacaaagcagactgcccgcaaatcgaccggtggtaaagcacccaggaagcaactggctacaaaagccgctcgcaagagtgcgccctctactggaggggtgaagaaacctcatcgttacaggcctggtactgtggcgctccgtgaaattagacgttatcagaagtccactgaacttctgattcgcaaacttcccttccagcgtctggtgcgagaaattgctcaggactttaaaacagatctgcgcttccagagcgcagctatcggtgctttgcaggaggcaagtgaggcctatctggttggcctttttgaagacaccaacctgtgtgctatccatgccaaacgtgtaacaattatgccaaaagacatccagctagcacgccgcatacgtggagaacgtgcttaa

SEQ ID NO: 728 - DNA, 651 bp, Homo Sapiens
atggctgcgcagggagagccccaggtccagttcaaacttgtattggttggtgatggtggtactggaaaaacgaccttcgtgaaacgtcatttgactggtgaatttgagaagaagtatgtagccaccttgggtgttgaggttcatcccctagtgttccacaccaacagaggacctattaagttcaatgtatgggacacagccggccaggagaaattcggtggactgagagatggctattatatccaagcccagtgtgccatcataatgtttgatgtaacatcgagagttacttacaagaatgtgcctaactggcatagagatctggtacgagtgtgtgaaaacatccccattgtgttgtgtggcaacaaagtggatattaaggacaggaaagtgaaggcgaaatccattgtcttccaccgaaagaagaatcttcagtactacgacatttctgccaaaagtaactacaactttgaaaagcccttcctctggcttgctaggaagctcattggagaccctaacttggaatttgttgccatgcctgctctcgccccaccagaagttgtcatggacccagctttggcagcacagtatgagcacgacttagaggttgctcagacaactgctctcccggatgaggatgatgacctgtga

SEQ ID NO: 729 - DNA, 2559 bp, Homo Sapiens
atggagtatgaaagacgtggtggtcgtggtgacaggactggccgctatggagccactgaccgctcgcaggatgatggtggggagaaccgcagccgagaccacgactaccgggacatggactaccgttcatatcctcgcgagtatggcagccaggagggcaagcatgactatgacgactcatctgaggagcagagtgcggagatccgtggccagctgcagtcgcacggcgtgcaagcacgggaggttcggctgatgcggaacaaatcttcaggtcagagccggggcttcgccttcgtcgagtttagtcacttgcaggacgctacacgatggatggaagccaatcagcactccctcaacatcctgggccagaaggtgtcgatgcactacagtgaccccaagcccaagatcaatgaggactggctgtgcaataagtgtggcgtccagaacttcaaacgccgagagaagtgcttcaaatgtggcgtgcccaagtcagaggcagagcagaagctgcccctcggcacgaggctggatcagcagacactgccactgggtggccgggagctgagccagggcctgcttcccctgccgcagccctaccaggcccagggagtcctggcctcccaagccctgtcacagggctcggagccaagctcagagaacgccaatgacaccatcattttgcgcaacctgaacccacacagcaccatggattccatcctgggggccctggcaccctacgcggtgctgtcctcctccaacgtgcgcgtcataaaggacaagcagacccaactgaaccgcggctttgccttcatccagctctccaccatcgaggcagcccagctgctgcagatcctgcaggccctgcacccaccactcactatcgacggcaagaccatcaatgttgagtttgccaagggttctaagagggacatggcctccaatgaaggcagtcgcatcagtgctgcctctgtggccagcactgccattgctgcggcccagtgggccatctcacaggcctcccaaggtggggagggtacctgggccacctccgaggagccgccggtcgactacagctactaccaacaggatgagggctatggcaacagccagggcacagagtcttccctctatgcccatggctacctcaagggcaccaagggccctggcatcactggaaccaaaggggatcccactggagcaggtcccgaggcctccctagagcctggggccgactctgtgtcgatgcaggctttctctcgcgcccagcctggtgctgctcctggcatctaccaacaatcagccgaggcgagcagtagccagggcactgctgccaacagccagtcgtataccatcatgtcacccgctgtgctcaaatctgagctccagagccctacccatcctagttctgctctcccaccggctaccagccccactgcccaggaatcctacagccagtaccctgttcccgacgtctctacctaccagtacgatgagacctccggctactactatgacccccagaccggcctctactatgaccccaactcccagtattactacaatgctcagagccagcagtacctgtactgggatggggagaggcggacctatgttcccgccctggagcagtcggccgacggacataaggagacaggggcaccctcgaaggagggcaaagagaagaaggagaagcacaagaccaagacagctcaacagattgccaaggacatggaacgctgggcccgcagtctcaacaaacaaaaagaaaacttcaaaaatagcttccagcctatcagctccctgcgagatgacgagaggcgggagtcagccactgcagatgctggctatgccatcctcgagaagaagggagcactagccgagagacagcacaccagcatggatctcccgaaattggccagtgacgaccgcccaagccctccgcgaggactggtggcagcctacagcggggagagtgacagtgaggaggagcaggagcgtgggggccctgagcgggaggagaagctcaccgactggcagaagctggcctgtctgctctgccgacgccagttccccagcaaagaggcgctcatccggcaccagcagctctcagggctccacaagcaaaaccttgagattcaccggcgagcccacttgtcagaaaacgagctagaagcactagagaagaatgacatggagcaaatgaagtaccgggaccgtgcagctgaacgcagagaaaagtatggcatccccgagccgccagagcccaagaggaggaagtacggcggcatatccacagcctctgtagacttcgagcagcctactcgggacgggctgggcagtgacaacattggcagtcggatgctgcaggccatgggctggaaagagggcagcggcctgggccgcaagaagcagggcattgtaacgcctatcgaggcccaaacacgggtgcggggctccggcctgggtgcacggggcagctcctacggggtcacctcaaccgagtcctacaaggagacactgcacaagacaatggtgacccgcttcaacgaggcccagtga

SEQ ID NO: 730 - DNA, 9804 bp, Homo Sapiens
atgcagaaagcccggggcacgcgaggcgaggatgcgggcacgagggcaccccccagccccggagtgcccccgaaaagggccaaggtgggggccggcggcggggctcctgtggccgtggccggggcgccagtcttcctgcggcccctgaagaacgcggcggtgtgcgcgggcagcgacgtgcggctgcgggtggtggtgagcgggacgccccagcccagcctccgctggttccgggatgggcagctcctgcccgcgccggcccccgagcccagctgcctgtggctgcggcgctgcggggcgcaggacgccggcgtgtacagctgcatggcccagaacgagcggggccgggcctcctgcgaggcggtgctcacagtgctggaggtcggagactcagagacggctgaggatgacatcagcgatgtgcagggaacccagcgcctggagcttcgggatgacggggccttcagcacccccacggggggttctgacaccctggtgggcacctccctggacacacccccgacctccgtgacaggcacctcagaggagcaagtgagctggtggggcagcgggcagacggtcctggagcaggaagcgggcagtgggggtggcacccgccgcctcccgggcagcccaaggcaagcacaggcaaccggggccgggccacggcacctgggggtggagccgctggtgcgggcatctcgagctaatctggtgggcgcaagctgggggtcagaggatagcctttccgtggccagtgacctgtacggcagcgcattcagcctgtacagaggacgggcgctctctatccacgtcagcgtccctcagagcgggttgcgcagggaggagcccgaccttcagcctcaactggccagcgaagccccacgccgccctgcccagccgcctccttccaaatccgcgctgctccccccaccgtcccctcgggtcgggaagcggtccccgccgggacccccggcccagcccgcggccacccccacgtcgccccaccgtcgcactcaggagcctgtgctgcccgaggacaccaccaccgaagagaagcgagggaagaagtccaagtcgtccgggccctccctggcgggcaccgcggaatcccgaccccagacgccactgagcgaggcctcaggccgcctgtcggcgttgggccgatcgcctaggctggtgcgcgccggctcccgcatcctggacaagctgcagttcttcgaggagcgacggcgcagcctggagcgcagcgactcgccgccggcgcccctgcggccctgggtgcccctgcgcaaggcccgctctctggagcagcccaagtcggagcgcggcgcaccgtggggcacccccggggcctcgcaggaagaactgcgggcgccaggcagcgtggccgagcggcgccgcctgttccagcagaaagcggcctcgctggacgagcgcacgcgtcagcgcagcccggcctcagacctcgagctgcgcttcgcccaggagctgggccgcatccgccgctccacgtcgcgggaggagctggtgcgctcgcacgagtccctgcgcgccacgctgcagcgtgccccatcccctcgagagcccggcgagcccccgctcttctctcggccctccacccccaagacatcgcgggccgtgagccccgccgccgcccagccgccctctccgagcagcgcggagaagccgggggacgagcctgggaggcccaggagccgcgggccggcgggcaggacagagccgggggaaggcccgcagcaggaggttaggcgtcgggaccaattcccgctgacccggagcagagccatccaggagtgcaggagccctgtgccgccccccgccgccgatcccccagaggccaggacgaaagcaccccccggtcggaagcgggagcccccggcgcaggccgtgcgcttcctgccctgggccacgccgggcctggagggcgctgctgtaccccagaccttggagaagaacagggcggggcctgaggcagagaagaggcttcgcagagggccggaggaggacggtccctgggggccctgggaccgccgaggggcccgcagccagggcaaaggtcgccgggcccggcccacctcccctgagctcgagtcttcggatgactcctacgtgtccgctggagaagagcccctagaggcccctgtgtttgagatccccctgcagaatgtggtggtggcaccaggggcagatgtgctgctcaagtgtatcatcactgccaaccccccgccccaagtgtcctggcacaaggatgggtcagcgctgcgcagcgagggccgcctcctcctccgggctgagggtgagcggcacaccctgctgctcagggaggccagggcagcagatgccgggagctatatggccaccgccaccaacgagctgggccaggccacctgtgccgcctcactgaccgtgagacccggtgggtctacatcccctttcagcagccccatcacctccgacgaggaatacctgagccccccagaggagttcccagagcctggggagacctggccgcgaacccccaccatgaagcccagtcccagccagaaccgccgttcttctgacactggctccaaggcaccccccaccttcaaggtctcacttatggaccagtcagtaagagaaggccaagatgtcatcatgagcatccgcgtgcagggggagcccaagcctgtggtctcctggctgagaaaccgccagcccgtgcgcccagaccagcggcgctttgcggaggaggctgagggtgggctgtgccggctgcggatcctggctgcagagcgtggcgatgctggtttctacacttgcaaagcggtcaatgagtatggtgctcggcagtgcgaggcccgcttggaggtccgagcacaccctgaaagccggtccctggccgtgctggcccccctgcaggacgtggacgtgggggccggggagatggcgctgtttgagtgcctggtggcggggcccactgacgtggaggtggattggctgtgccgtggccgcctgctgcagcctgcactgctcaaatgcaagatgcatttcgatggccgcaaatgcaagctgctacttacatctgtacatgaggacgacagtggcgtctacacctgcaagctcagcacggccaaagatgagctgacctgcagtgcccggctgaccgtgcggccctcgttggcacccctgttcacacggctgctggaagatgtggaggtgttggagggccgagctgcccgtttcgactgcaagatcagtggcaccccgccccctgttgttacctggactcattttggctgccccatggaggagagtgagaacttgcggctgcggcaggacgggggtctgcactcactgcacattgcccatgtgggcagcgaggacgaggggctctatgcggtcagtgctgttaacacccatggccaggcccactgctcagcccagctgtatgtagaagagccccggacagccgcctcaggccccagctcgaagctggagaagatgccatccattcccgaggagccagagcagggtgagctggagcggctgtccattcctgacttcctgcggccactgcaggacctggaggtgggactggccaaggaggccatgctagagtgccaggtgaccggcctgccctaccccaccatcagctggttccacaatggccaccgcatccagagcagcgacgaccggcgcatgacacagtacagggatgtccatcgcttggtgttccctgccgtggggcctcagcacgccggtgtctacaagagcgtcattgccaacaagctgggcaaagctgcctgctatgcccacctgtatgtcacagatgtggtcccaggccctccagatggcgccccgcaggtggtggctgtgacggggaggatggtcacactcacatggaacccccccaggagtctggacatggccatcgacccggactccctgacgtacacagtgcagcaccaggtgctgggctcggaccagtggacggcactggtcacaggcctgcgggagccagggtgggcagccacagggctgcgtaagggggtccagcacatcttccgggtcctcagcaccactgtcaagagcagcagcaagccctcacccccttctgagcctgtgcagctgctggagcacggcccaaccctggaggaggcccctgccatgctggacaaaccagacatcgtgtatgtggtggagggacagcctgccagcgtcaccgtcacattcaaccatgtggaggcccaggtcgtctggaggagctgccgaggggccctcctagaggcacgggccggtgtgtacgagctgagccagccagatgatgaccagtactgtcttcggatctgccgggtgagccgccgggacatgggggccctcacctgcaccgcccgaaaccgtcacggcacacagacctgctcggtcacattggagctggcagaggcccctcggtttgagtccatcatggaggacgtggaggtgggggctggggaaactgctcgctttgcggtggtggtcgagggaaaaccactgccggacatcatgtggtacaaggacgaggtgctgctgaccgagagcagccatgtgagcttcgtgtacgaggagaatgagtgctccctggtggtgctcagcacgggggcccaggatggaggcgtctacacctgcaccgcccagaacctggcgggtgaggtctcctgcaaagcagagttggctgtgcattcagctcagacagctatggaggtcgagggggtcggggaggatgaggaccatcgaggaaggagactcagcgacttttatgacatccaccaggagatcggcaggggtgctttctcctacttgcggcgcatagtggagcgtagctccggcctggagtttgcggccaagttcatccccagccaggccaagccaaaggcatcagcgcgtcgggaggcccggctgctggccaggctccagcacgactgtgtcctctacttccatgaggccttcgagaggcgccggggactggtcattgtcaccgagctctgcacagaggagctgctggagcgaatcgccaggaaacccaccgtgtgtgagtctgagatccgggcctatatgcggcaggtgctagagggaatacactacctgcaccagagccacgtgctgcacctcgatgtcaagcctgagaacctgctggtgtgggatggtgctgcgggcgagcagcaggtgcggatctgtgactttgggaatgcccaggagctgactccaggagagccccagtactgccagtatggcacacctgagtttgtagcacccgagattgtcaatcagagccccgtgtctggagtcactgacatctggcctgtgggtgttgttgccttcctctgtctgacaggaatctccccgtttgttggggaaaatgaccggacaacattgatgaacatccgaaactacaacgtggccttcgaggagaccacattcctgagcctgagcagggaggcccggggcttcctcatcaaagtgttggtgcaggaccggctgagacctaccgcagaagagaccctagaacatccttggttcaaaactcaggcaaagggcgcagaggtgagcacggatcacctgaagctattcctctcccggcggaggtggcagcgctcccagatcagctacaaatgccacctggtgctgcgccccatccccgagctgctgcgggcccccccagagcgggtgtgggtgaccatgcccagaaggccaccccccagtggggggctctcatcctcctcggattctgaagaggaagagctggaagagctgccctcagtgccccgcccactgcagcccgagttctctggctcccgggtgtccctcacagacattcccactgaggatgaggccctggggaccccagagactggggctgccacccccatggactggcaggagcagggaagggctccctctcaggaccaggaggctcccagcccagaggccctcccctccccaggccaggagcccgcagctggggctagccccaggcggggagagctccgcaggggcagctcggctgagagcgccctgccccgggccgggccgcgggagctgggccggggcctgcacaaggcggcgtctgtggagctgccgcagcgccggagccccagcccgggagccacccgcctggcccggggaggcctgggtgagggcgagtatgcccagaggctgcaggccctgcgccagcggctgctgcggggaggccccgaggatggcaaggtcagcggcctcaggggtcccctgctggagagcctggggggccgtgctcgggacccccggatggcacgagctgcctccagcgaggcagcgccccaccaccagcccccactcgagaaccggggcctgcaaaagagcagcagcttctcccagggtgaggcggagccccggggccggcaccgccgagcgggggcgcccctcgagatccccgtggccaggcttggggcccgtaggctacaggagtctccttccctgtctgccctcagcgaggcccagccatccagccctgcacggcccagcgcccccaaacccagtacccctaagtctgcagaaccttctgccaccacacctagtgatgctccgcagccccccgcaccccagcctgcccaagacaaggctccagagcccaggccagaaccagtccgagcctccaagcctgcaccacccccccaggccctgcaaaccctagcgctgcccctcacaccctatgctcagatcattcagtccctccagctgtcaggccacgcccagggcccctcgcagggccctgccgcgccgccttcagagcccaagccccacgctgctgtctttgccagggtggcctccccacctccgggagcccccgagaagcgcgtgccctcagccgggggtcccccggtgctagccgagaaagcccgagttcccacggtgccccccaggccaggcagcagtctcagtagcagcatcgaaaacttggagtcggaggccgtgttcgaggccaagttcaagcgcagccgcgagtcgcccctgtcgctggggctgcggctgctgagccgttcgcgctcggaggagcgcggccccttccgtggggccgaggaggaggatggcatataccggcccagcccggcggggaccccgctggagctggtgcgacggcctgagcgctcacgctcggtgcaggacctcagggctgtcggagagcctggcctcgtccgccgcctctcgctgtcactgtcccagcggctgcggcggacccctcccgcgcagcgccacccggcctgggaggcccgcggcggggacggagagagctcggagggcgggagctcggcgcggggctccccggtgctggcgatgcgcaggcggctgagcttcaccctggagcggctgtccagccgattgcagcgcagtggcagcagcgaggactcggggggcgcgtcgggccgcagcacgccgctgttcggacggcttcgcagggccacgtccgagggcgagagtctgcggcgccttggccttccgcacaaccagttggccgcccaggccggcgccaccacgccttccgccgagtccctgggctccgaggccagcgccacgtcgggctcctcagccccaggggaaagccgaagccggctccgctggggcttctctcggccgcggaaggacaaggggttatcgccaccaaacctctctgccagcgtccaggaggagttgggtcaccagtacgtgcgcagtgagtcagacttccccccagtcttccacatcaaactcaaggaccaggtgctgctggagggggaggcagccaccctgctctgcctgccagcggcctgccctgcaccgcacatctcctggatgaaagacaagaagtccttgaggtcagagccctcagtgatcatcgtgtcctgcaaagatgggcggcagctgctcagcatcccccgggcgggcaagcggcacgccggtctctatgagtgctcggccaccaacgtactgggcagcatcaccagctcctgtaccgtggctgtggcccgagtcccaggaaagctagctcctccagaggtaccccagacctaccaggacacggcgctggtgctgtggaagccgggagacagccgggcaccttgcacgtatacgctggagcggcgagtggatggggagtctgtgtggcaccctgtgagctcaggcatccccgactgttactacaacgtgacccacctgccagttggcgtgactgtgaggttccgtgtggcctgtgccaaccgtgctgggcaggggcccttcagcaactcttctgagaaggtctttgtcaggggtactcaagattcttcagctgtgccatctgctgcccaccaagaggcccctgtcacctcaaggccagccagggcccggcctcctgactctcctacctcactggccccacccctagctcctgctgcccccacacccccgtcagtcactgtcagcccctcatctccccccacacctcctagccaggccttgtcctcgctcaaggctgtgggtccaccaccccaaacccctccacgaagacacaggggcctgcaggctgcccggccagcggagcccaccctacccagtacccacgtcaccccaagtgagcccaagcctttcgtccttgacactgggaccccgatcccagcctccactcctcaaggggttaaaccagtgtcttcctctactcctgtgtatgtggtgacttcctttgtgtctgcaccaccagcccctgagcccccagcccctgagccccctcctgagcctaccaaggtgactgtgcagagcctcagcccggccaaggaggtggtcagctcccctgggagcagtccccgaagctctcccaggcctgagggtaccactcttcgacagggtccccctcagaaaccctacaccttcctggaggagaaagccaggggccgctttggtgttgtgcgagcgtgccgggagaatgccacggggcgaacgttcgtggccaagatcgtgccctatgctgccgagggcaagcggcgggtcctgcaggagtacgaggtgctgcggaccctgcaccacgagcggatcatgtccctgcacgaggcctacatcacccctcggtacctcgtgctcattgctgagagctgtggcaaccgggaactcctctgtgggctcagtgacaggttccggtattctgaggatgacgtggccacttacatggtgcagctgctacaaggcctggactacctccacggccaccacgtgctccacctagacatcaagccagacaacctgctgctggcccctgacaatgccctcaagattgtggactttggcagtgcccagccctacaacccccaggcccttaggccccttggccaccgcacgggcacgctggagttcatggctccggagatggtgaagggagaacccatcggctctgccacggacatctggggagcgggtgtgctcacttacattatgctcagtggacgctccccgttctatgagccagacccccaggaaacggaggctcggattgtggggggccgctttgatgccttccagctgtaccccaatacatcccagagcgccaccctcttcttgcgaaaggttctctctgtacatccctggagccggccctccctgcaggactgcctggcccacccatggttgcaggacgcctacctgatgaagctgcgccgccagacgctcaccttcaccaccaaccggctcaaggagttcctgggcgagcagcggcggcgccgggctgaggctgccacccgccacaaggtgctgctgcgctcctaccctggcggcccctag

SEQ ID NO: 731 - DNA, 1125 bp, Homo Sapiens
atgagcgtcccggccttcatcgacatcagtgaagaagatcaggctgctgagcttcgtgcttatctgaaatctaaaggagctgagatttcagaagagaactcggaaggtggacttcatgttgatttagctcaaattattgaagcctgtgatgtgtgtctgaaggaggatgataaagatgttgaaagtgtgatgaacagtgtggtatccctactcttgatcctggaaccagacaagcaagaagctttgattgaaagcctatgtgaaaagctggtcaaatttcgcgaaggtgaacgcccgtctctgagactgcagttgttaagcaaccttttccacgggatggataagaatactcctgtaagatacacagtgtattgcagccttattaaagtggcagcatcttgtggggccatccagtacatcccaactgagctggatcaagttagaaaatggatttctgactggaatctcaccactgaaaaaaagcacacccttttaagactactttatgaggcacttgtggattgtaagaagagtgatgctgcttcaaaagtcatggtggaattgctcggaagttacacagaggacaatgcttcccaggctcgagttgatgcccacaggtgtattgtacgagcattgaaagatccaaatgcatttctttttgaccaccttcttactttaaaaccagtcaagtttttggaaggcgagcttattcatgatcttttaaccatttttgtgagtgctaaattggcatcatatgtcaagttttatcagaataataaagacttcattgattcacttggcctgttacatgaacagaatatggcaaaaatgagactacttacttttatgggaatggcagtagaaaataaggaaatttcttttgacacaatgcagcaagaacttcagattggagctgatgatgttgaagcatttgttattgacgccgtaagaactaaaatggtctactgcaaaattgatcagacccagagaaaagtagttgtcagtcatagcacacatcggacatttggaaaacagcagtggcaacaactgtatgacacacttaatgcctggaaacaaaatctgaacaaagtgaaaaacagccttttgagtctttctgatacctga

SEQ ID NO: 732 - DNA, 1737 bp, Homo Sapiens
atggcgtgcggctttcgccgcgctattgcttgccagctttccagagtgttgaatcttccaccagaaaacttgatcacatcaatatctgcagttccaatttcccaaaaagaagaagtagctgattttcagctttctgtggattctttattggaaaaagacaatgaccattcaagaccagatattcaagttcaagccaagagactagcagagaagctaagatgtgatacagtggtgagtgaaatcagtactggtcaaaggactgtaaatttcaaaataaacagagagctcttaacaaagacagtgctacaacaagtaattgaagatggctcaaaatatggattaaaaagtgaacttttctctggacttccccagaagaagattgtggttgaattcagttcacctaatgttgccaaaaaatttcatgttggacatttgcgttctaccatcataggaaattttatagcaaatctcaaagaagctttaggacatcaagtaataagaataaattaccttggcgattggggcatgcagtttggtcttctgggaactggcttccagctgtttggctatgaggaaaaactgcagtccaatcctctacagcatctctttgaagtttatgtacaagttaataaagaagcagcagatgataaaagtgtagcaaaagcagcacaggagttcttccaacgattggaactgggcgatgtgcaagcactttcactgtggcaaaaatttcgggacttgagcattgaagagtacattcgggtttacaagcgtctgggagtatattttgatgaatattcaggagaatcattttatcgtgaaaaatctcaagaggtcttaaagttgctggagagtaaaggactcctactgaaaacaataaaaggaacggctgtagtagatctctctgggaatggcgacccctcctcaatttgtactgtaatgcgaagtgatgggacttctctctatgcaaccagagatcttgcagctgctatagatcgaatggacaagtataattttgatacaatgatatatgtgacagataaaggacaaaaaaagcattttcagcaagtattccaaatgctgaagatcatgggatatgactgggcagaaaggtgccagcacgtgccctttggagtagtacagggaatgaagactcgaagaggagatgtcactttcctggaagatgttttaaatgagattcaattaaggatgctacagaacatggcttcaattaagacaactaaagaactcaagaacccacaagagactgcagagagggtcgggctcgcagcactcattattcaggacttcaaaggtttactcttatctgactacaagttcagctgggatcgtgttttccagagtcgcggggacacaggagtcttcctacagtacacacacgcccgcctccacagtttggaagagacttttggatgtgggtacctgaatgacttcaacactgcttgtttacaagagccacagtctgtttcaattcttcagcatcttctcaggttcgacgaggtgctttataaatcatctcaggactttcaacccaggcatatcgtcagttaccttctaactttaagtcatcttgcagctgtggcacacaaaacactacaaataaaagatagtcctcctgaagtggctggggccagacttcatcttttcaaagctgtccgttctgtcctagccaatggaatgaaacttcttggaataacacctgtatgtaggatgtaa

SEQ ID NO: 733 - DNA, 2232 bp, Homo Sapiens
atgctgagccggctcggggcgctgctgcaggaagccgtgggggcgcgcgagcccagcattgacctgctgcaggccttcgtggagcactggaagggcatcacgcactactacatcgagagcacagatgaaagcacccccgccaagaagacagacattccctggcggctgaagcagatgctggatatcctggtgtatgaagagcagcagcaggcggccgcgggtgaggcagggccctgcctggagtacctgctgcagcacaagatcctggagactctctgcacgctgggcaaggccgagtaccccccaggcatgcggcagcaggtgttccagttcttcagcaaggttctggcgcaggtgcagcaccccctgctgcattacctcagcgtccacaggcctgtgcagaaactcctccgacttggtgggactgcttccggatccgttacagaaaaggaggaggtgcagttcaccaccgtcctctgctccaagatccagcaggacccagagctgctcgcctacatcctggaaggtaaaaagattgtaggtaggaagaaagcatgcggagaacccactgccctgcctaaggacacaaccagccacggggacaaggactgctcccacgatggtgctcctgccaggccccagctggacggggagtcctgtggggcccaggccttgaacagccacatgcctgctgagaccgaggagctggacggtgggaccacagagagcaacctgattacctccctgcttgggctgtgccagagcaagaagagtcgggtggccttgaaggcccaggagaacctgctgctcctggtgagcatggcctccccagcagctgccacctacctggtacagagcagcgcctgctgccctgcgatcgtccggcacctttgccagttgtaccggtccatgcctgtcttcctggaccccgcagacattgccaccttagagggcatcagctggaggttacccagtgccccgtctgatgaggcttccttccctggcaaggaggccttggctgccttcttgggctggtttgattactgcgaccacctcatcacagaggcacacacggtggttgcggacgccttggcgaaggctgtggctgagaacttcttcgtggagaccctgcagccccagctcctgcacgtgtccgagcagagcatcttgacctccaccgccctcctcacagccatgctgcgccagcttcgctcccctgcgctgctgcgggaggccgtggctttcctcctgggcacagaccggcagcctgaagcccccggggacaacccccacaccctgtatgctcatctcatcgggcattgtgaccacctctctgatgagatcagcatcaccacactccggctgtttgaggagctgctgcagaagccccacgaggggatcatccacagcctggtcctgcgcaaccttgagggccgcccttacgtggcctggggctcaccagagcctgagagctatgaggacaccctagacctggaggaagacccctacttcaccgacagcttcctggattccggctttcaaactcccgcaaagcctcgcctagctcctgctaccagttacgatggcaaaacagcagtgaccgagatcgtcaacagtttcctgtgcctggtccccgaggaagccaagacctctgccttcctggaggagacaggctatgacacatacgtccacgatgcttatggcctgttccaggagtgcagctcccgcgtcgcctcctggggctggcctctgacccccacacctttggacccccatgagcccgagcgacctttcttcgagggccacttcctccgagtgctgtttgaccgcatgtcccggattctggatcagccatacagcctgaacctgcaggtgacctcggtcctgtcccggcttgccctcttcccccacccccatattcatgagtacctgctggatccgtacatcagcctggcccccggctgcaggagcctattctccgtgttggtgagggtgatcggggacttgatgcagagaatccagagggtaccccagttcccaggcaagctgctcctggtgcgcaagcagttgacgggccaggctcctggggagcagctggaccaccagaccctcctccagggcgtggtggtgctggaggagttctgcaaggagctggctgccattgccttcgtcaagtttcccccacatgatcctcgccagaacgtctccccagccccggaagggcaggtctga

SEQ ID NO: 734 - DNA, 2280 bp, Homo Sapiens
atggcagagggtgaggatatgcagaccttcacttccatcatggacgcactggtccgcatcagtaccagcatgaagaacatggagaaggaactgctgtgcccagtgtgtcaagagatgtacaagcagccactggtgctgccctgtacccacaacgtgtgccaggcctgtgcccgagaggtcttgggccagcagggctacataggacatggtggggaccccagctccgagcccacctctcctgcctccaccccttccacccgcagcccccgcctctcccgcagaactctccccaagccagaccgcctggaccggctgcttaagtcaggctttgggacataccctgggaggaagcgaggtgctttgcacccccaagtgatcatgttcccgtgcccagcctgccaaggtgatgtggagcttggggagcggggtctggcagggcttttccggaacctgaccctggagcgtgtggtggagcggtaccgccagagtgtgagtgtgggaggtgccatcctgtgccagttgtgcaagcccccaccactagaggccaccaagggctgcacagagtgccgcgccaccttctgcaatgagtgcttcaagctcttccacccctggggcacccagaaggcccagcatgagcccaccctgcctaccctctccttccgacccaagggccttatgtgcccagaccacaaggaagaggtgacccactactgcaagacatgccaacgcctggtatgtcaactctgccgggtgcggcgcacccacagcgggcacaagatcacaccagtgctcagtgcctaccaggccctcaaggacaagctgacaaagagcctgacatacatcctgggaaaccaggacacggtacagacccagatctgtgagctggaggaggccgtgaggcacaccgaggtgagtggtcagcaggccaaggaggaggtgtcgcagctggtgcgggggctgggggctgtgctggaggagaagcgggcatcactgcttcaggccattgaagaatgccagcaggagcggctggcccgtctcagcgcccagatccaggagcaccggagcctgctggatggctcaggtctggtgggctatgcccaggaagtacttaaggaaacagaccagccttgctttgtgcaagccgccaagcagctgcacaacaggattgcccgagccactgaagccctccagacattccggccagctgccagctcctccttccgccattgccagctcgacgtgggacgtgagatgaagctgctgacagagcttaacttcctgcgagtgcctgaggcccccgtcattgacacccagcgcacctttgcctatgatcagatcttcctgtgctggcggctgcccccccattcaccacctgcctggcactataccgttgagttccggcgcacggatgtgcctgctcagccaggccccacccgctggcagcggcgggaggaggtgaggggcaccagtgccctgcttgagaaccccgacacgggctctgtgtatgtgctgcgtgtccgcggctgcaacaaggccggctacggcgaatacagtgaagatgtgcacctgcacacgcccccggcacctgtcctgcacttcttcctcgatagccgctggggcgcaagccgagagcggctggctatcagcaaggaccagcgagcagtacggagtgttccagggctgcccctgctgctggctgctgaccggctgctgaccggctgccacctgagtgtggatgtggtcctgggcgacgtggctgtgacccagggccgcagctactgggcctgcgccgtagacccagcctcctacttggtcaaggtgggcgtcgggctggagagcaagcttcaagaaagtttccagggtgcccccgatgtgatcagccccaggtacgacccggacagcgggcacgacagcggtgccgaggatgccacagtggaggcgtcgccacccttcgctttcctaaccattggcatgggcaagatcctgctggggtcgggggcaagctcaaacgcagggctgacagggagggatggccccacagccggctgcacagtgcccctgccaccccgcctgggcatctgcctggactatgagcggggccgggtttccttcctggatgctgtttccttccgtgggctcttggagtgccccctggactgctcagggcctgtgtgccctgccttttgcttcatcgggggtggcgcagtacagctccaggagccagtgggcactaagcctgagaggaaagtcaccattgggggcttcgccaagctggactga

SEQ ID NO: 735 - DNA, 825 bp, Homo Sapiens
atgctgaccccgatggtggccgggggggtggtgttccccggactcttcctcctctccaagaacacgctccagcggctgccccagctacgctgggaggaggccgacgcagtcattgtctcagccaggctggtgtcctctgtccaggccatcatggcctccactgccggctacatcgtctccacctcctgcaagcacatcattgatgaccaacactggctgtcctctgcctacacgcaatttgctgtgccctacttcatctacgacatctacgccatgttcctctgtcactggcacaagcaccaggtcaaagggcatggaggggacgacggagcggccagagccccgggcagcacgtgggccatagcgcgtggctacctgcacaaggagttcctcatggtgctccaccatgccgccatggtgctggtgtgcttcccactctcagtggtgtggcgacagggtaagggagacttctttctgggttgcatgttgatggcagaggtcagcacgcccttcgtctgccttggcaagatcctcatccagtacaagcagcagcacacactgctgcacaaggtgaacggggccctgatgctgctcagcttcctctgctgccgggtgctgctctttccctacctgtactgggcctacgggcgccatgccggcctgcccctgctggccgtgcccctggccatccctgcccacgtcaacctgggcgctgcgctgctcctggcccctcagctctactggttcttcctcatctgccgtggggcctgccgcctcttctggccccgctcccggccgcccccggcctgccaggcccaggactga

SEQ ID NO: 736 - DNA, 2172 bp, Homo Sapiens
atgccgctcttcttccggaagcggaaacccagtgaggaggctcggaaacgcctggagtaccagatgtgtttggcaaaagaagctggggcagatgacattctcgacatctctaaatgtgagctctcagagattccatttggagcttttgcaacatgcaaagttctgcagaagaaggtgctgatcgtccacacgaatcacctcacttccctgcttcccaaatcctgcagcctcctgagtctggcaaccatcaaggttctagatctccacgataatcagctgacagcccttcctgacgatctggggcagctgactgccctccaggtcttaaacgtggaaaggaatcaactgatgcagctcccacgttccattgggaacctgacccagctccagactctcaatgttaaagacaacaagctgaaggagcttccagacaccgtgggggagcttcgaagcctgcgtaccctcaacatcagtggaaacgagatccagagattgccgcagatgctggctcacgttcgaaccctggagatgctgagccttgacgcctcggccatggtctacccgccgcgggaggtgtgtggtgccggcactgcggccatcttgcagttcctctgcaaagagtcagggctggaatactaccccccttctcagtacttgctgccaattctggagcaagatggaatcgagaactctcgggacagccctgatgggcccacggacagattctcaagggaggagttagagtggcagaacaggttctcagactatgagaagaggaaggaacagaagatgctggagaaactcgagtttgaacggcgcctggaactggggcagcgggagcacacccagctccttcagcagagcagcagccagaaggatgagatccttcagacggtcaaggaggagcagtcccggctggagcagggcctgagtgagcaccagcgccacctcaacgcagagcggcagcggctgcaggagcagctgaagcagacggaacagaacatttccagccggatccagaagctgctgcaggacaatcagagacaaaagaaaagctccgagattttgaaatcgctggaaaatgaaagaataagaatggaacagttgatgtccataacccaggaggagactgagagcctgcggcgacgtgacgttgcctccgccatgcagcagatgctgactgagagctgtaagaaccggctcatccagatggcctacgaatctcagaggcagaacttggtccagcaggcctgttccagcatggccgaaatggatgaacgattccagcagattctgtcgtggcagcaaatggatcagaacaaagccatcagccagatcctgcaggagagcgcgatgcagaaggctgcgttcgaggcactccaggtgaagaaagacctgatgcatcggcagatcaggagccagattaagttaatagaaactgagttattgcagctgacacagctggagttaaagaggaagtccctggacacagagtcactccaggagatgatctcggagcagcgctgggccctcagctccctgctccagcagctgctcaaagagaagcagcagcgagaggaagagctccgggaaatcctgacggagttagaagccaaaagtgaaaccaggcaggaaaattactggctgattcagtatcaacggcttttgaaccagaagcccttgtccttgaagctgcaagaagaggggatggagcgccagctggtggccctcctggaggagctgtcggctgagcactacctgcccatctttgcgcaccaccgcctctcactggacctgctgagccaaatgagcccaggggacctggccaaggtgggcgtctcagaagctggcctgcagcacgagatcctccggagagtccaggaactgctggatgcagccaggatccagccagagctgaaaccaccaatgggtgaggtcgtcacccctacggccccccaggagcctcctgagtctgtgaggccatccgctccccctgcagagctggaggtgcaggcctcagagtgtgtcgtgtgcctggaacgggaggcccagatgatcttcctcaactgtggccacgtctgctgctgccagcagtgctgccagccactgcgcacctgcccgctgtgccgccaggacatcgcccagcgcctccgcatctaccacagcagctga

SEQ ID NO: 737 - DNA, 924 bp, Homo Sapiens
atggcggagatcagcgacctggaccggcagatcgagcagctgcgtcgctgcgagctcatcaaggagagcgaagtcaaggccctgtgcgctaaggccagagagatcttggtagaggagagcaacgtgcagagggtggactcgccagtcacagtgtgcggcgacatccatggacaattctatgacctcaaagagctgttcagagtaggtggcgacgtccctgagaccaactacctcttcatgggggactttgtggaccgtggcttctatagcgtcgaaacgttcctcctgctgctggcacttaaggttcgctatcctgatcgcatcacactgatccggggcaaccatgagagtcgccagatcacgcaggtctatggcttctacgatgagtgcctgcgcaagtacggctcggtgactgtgtggcgctactgcactgagatctttgactacctcagcctgtcagccatcatcgatggcaagatcttctgcgtgcacgggggcctctccccctccatccagaccctggatcagattcggacaatcgaccgaaagcaagaggtgcctcatgatgggcccatgtgtgacctcctctggtctgacccagaagacaccacaggctggggcgtgagcccccgaggagccggctacctatttggcagtgacgtggtggcccagttcaacgcagccaatgacattgacatgatctgccgtgcccaccaactggtgatggaaggttacaagtggcacttcaatgagacggtgctcactgtgtggtcggcacccaactactgctaccgctgtgggaatgtggcagccatcttggagctggacgagcatctccagaaagatttcatcatctttgaggctgctccccaagagacacggggcatcccctccaagaagcccgtggccgactacttcctgtga

SEQ ID NO: 738 - DNA, 624 bp, Homo Sapiens
atggccccctttgagcccctggcttctggcatcctgttgttgctgtggctgatagcccccagcagggcctgcacctgtgtcccaccccacccacagacggccttctgcaattccgacctcgtcatcagggccaagttcgtggggacaccagaagtcaaccagaccaccttataccagcgttatgagatcaagatgaccaagatgtataaagggttccaagccttaggggatgccgctgacatccggttcgtctacacccccgccatggagagtgtctgcggatacttccacaggtcccacaaccgcagcgaggagtttctcattgctggaaaactgcaggatggactcttgcacatcactacctgcagttttgtggctccctggaacagcctgagcttagctcagcgccggggcttcaccaagacctacactgttggctgtgaggaatgcacagtgtttccctgtttatccatcccctgcaaactgcagagtggcactcattgcttgtggacggaccagctcctccaaggctctgaaaagggcttccagtcccgtcaccttgcctgcctgcctcgggagccagggctgtgcacctggcagtccctgcggtcccagatagcctga

SEQ ID NO: 739 - DNA, 4440 bp, Homo Sapiens
atggccaagcgctccaggggccccgggcgccgctgcctgttggcgctcgtgctgttctgcgcctgggggacgctggccgtggtggcccagaagccgggcgcagggtgtccgagccgctgcctgtgcttccgcaccaccgtgcgctgcatgcatctgctgctggaggccgtgcccgccgtggcgccgcagacctccatcctagatcttcgctttaacagaatcagagagatccaacctggggcattcaggcggctgaggaacttgaacacattgcttctcaataataatcagatcaagaggatacctagtggagcatttgaagacttggaaaatttaaaatatctctatctgtacaagaatgagatccagtcaattgacaggcaagcatttaagggacttgcctctctagagcaactatacctgcactttaatcagatagaaactttggacccagattcgttccagcatctcccgaagctcgagaggctatttttgcataacaaccggattacacatttagttccagggacatttaatcacttggaatctatgaagagattgcgactggactcaaacacacttcactgcgactgtgaaatcctgtggttggcggatttgctgaaaacctacgcggagtcggggaacgcgcaggcagcggccatctgtgaatatcccagacgcatccagggacgctcagtggcaaccatcaccccggaagagctgaactgtgaaaggccccggatcacctccgagccccaggacgcagatgtgacctcggggaacaccgtgtacttcacctgcagagccgaaggcaaccccaagcctgagatcatctggctgcgaaacaataatgagctgagcatgaagacagattcccgcctaaacttgctggacgatgggaccctgatgatccagaacacacaggagacagaccagggtatctaccagtgcatggcaaagaacgtggccggagaggtgaagacgcaagaggtgaccctcaggtacttcgggtctccagctcgacccacttttgtaatccagccacagaatacagaggtgctggttggggagagcgtcacgctggagtgcagcgccacaggccaccccccgccgcggatctcctggacgagaggtgaccgcacacccttgccagttgacccgcgggtgaacatcacgccttctggcgggctttacatacagaacgtcgtacagggggacagcggagagtatgcgtgctctgcgaccaacaacattgacagcgtccatgccaccgctttcatcatcgtccaggctcttcctcagttcactgtgacgcctcaggacagagtcgttattgagggccagaccgtggatttccagtgtgaagccaagggcaacccgccgcccgtcatcgcctggaccaagggagggagccagctctccgtggaccggcggcacctggtcctgtcatcgggaacacttagaatctctggtgttgccctccacgaccagggccagtacgaatgccaggctgtcaacatcatcggctcccagaaggtcgtggcccacctgactgtgcagcccagagtcaccccagtgtttgccagcattcccagcgacacaacagtggaggtgggcgccaatgtgcagctcccgtgcagctcccagggcgagcccgagccagccatcacctggaacaaggatggggttcaggtgacagaaagtggaaaatttcacatcagccctgaaggattcttgaccatcaatgacgttggccctgcagacgcaggtcgctatgagtgtgtggcccggaacaccattgggtcggcctcggtgagcatggtgctcagtgtgaatgttcctgacgtcagtcgaaatggagatccgtttgtagctacctccatcgtggaagcgattgcgactgttgacagagctataaactcaacccgaacacatttgtttgacagccgtcctcgttctccaaatgatttgctggccttgttccggtatccgagggatccttacacagttgaacaggcacgggcgggagaaatctttgaacggacattgcagctcattcaggagcatgtacagcatggcttgatggtcgacctcaacggaacaagttaccactacaacgacctggtgtctccacagtacctgaacctcatcgcaaacctgtcgggctgtaccgcccaccggcgcgtgaacaactgctcggacatgtgcttccaccagaagtaccggacgcacgacggcacctgtaacaacctgcagcaccccatgtggggcgcctcgctgaccgccttcgagcgcctgctgaaatccgtgtacgagaatggcttcaacacccctcggggcatcaacccccaccgactgtacaacgggcacgcccttcccatgccgcgcctggtgtccaccaccctgatcgggacggagaccgtcacacccgacgagcagttcacccacatgctgatgcagtggggccagttcctggaccacgacctcgactccacggtggtggccctgagccaggcacgcttctccgacggacagcactgcagcaacgtgtgcagcaacgaccccccctgcttctctgtcatgatcccccccaatgactcccgggccaggagcggggcccgctgcatgttcttcgtgcgctccagccctgtgtgcggcagcggcatgacttcgctgctcatgaactccgtgtacccgcgggagcagatcaaccagctcacctcctacatagacgcatccaacgtgtacgggagcacggagcatgaggcccgcagcatccgcgacctggccagccaccgcggcctgctgcggcagggcatcgtgcagcggtccgggaagccgctgctccccttcgccaccgggccgcccacggagtgcatgcgggacgagaacgagagccccatcccctgcttcctggccggggaccaccgcgccaacgagcagctgggcctgaccagcatgcacacgctgtggttccgcgagcacaaccgcattgccacggagctgctcaagctgaacccgcactgggacggcgacaccatctactatgagaccaggaagatcgtgggtgcggagatccagcacatcacctaccagcactggctcccgaagatcctgggggaggtgggcatgaggacgctgggagagtaccacggctacgaccccggcatcaatgctggcatcttcaacgccttcgccaccgcggccttcaggtttggccacacgcttgtcaacccactgctttaccggctggacgagaacttccagcccattgcacaagatcacctcccccttcacaaagctttcttctctcccttccggattgtgaatgagggcggcatcgatccgcttctcagggggctgttcggggtggcggggaaaatgcgtgtgccctcgcagctgctgaacacggagctcacggagcggctgttctccatggcacacacggtggctctggacctggcggccatcaacatccagcggggccgggaccacgggatcccaccctaccacgactacagggtctactgcaatctatcggcggcacacacgttcgaggacctgaaaaatgagattaaaaaccctgagatccgggagaaactgaaaaggttgtatggctcgacactcaacatcgacctgtttccggcgctcgtggtggaggacctggtgcctggcagccggctgggccccaccctgatgtgtcttctcagcacacagttcaagcgcctgcgagatggggacaggttgtggtatgagaaccctggggtgttctccccggcccagctgactcagatcaagcagacgtcgctggccaggatcctatgcgacaacgcggacaacatcacccgggtgcagagcgacgtgttcagggtggcggagttccctcacggctacggcagctgtgacgagatccccagggtagacctccgggtgtggcaggactgctgtgaagactgtaggaccagggggcagttcaatgccttttcctatcatttccgaggcagacggtctcttgagttcagctaccaggaggacaagccgaccaagaaaacaagaccacggaaaatacccagtgttgggagacagggggaacatctcagcaacagcacctcagccttcagcacacgctcagatgcatctgggacaaatgacttcagagagtttgttctggaaatgcagaagaccatcacagacctcagaacacagataaagaaacttgaatcacggctcagtaccacagagtgcgtggatgccgggggcgaatctcacgccaacaacaccaagtggaaaaaagatgcatgcaccatttgtgaatgcaaagacgggcaggtcacctgcttcgtggaagcttgcccccctgccacctgtgctgtccccgtgaacatcccaggggcctgctgtccagtctgcttacagaagagggcggaggaaaagccctag

SEQ ID NO: 740 - DNA, 999 bp, Homo Sapiens
gttccactggctgctttgggggctcctactcttgatcctgcccttgctgcacttgggctacctggagcaaacttgaactctcagtctcttgctgcagatcagttgctgaagcttatgagtactgttgatcccaagttgaatcatgtagctgctggtctcgtttcaccaagtctgaaatcggatacctctagtaaagaaatagaggaagctatgaaaagagtacgagaagcacagtccctaatttctgctgctatagaaccagataagaaagaagaaaaaagaaggcattcaagatcaagatcacgttctaggaggaggaggactccctcatcttctagacacaggcggtcaagaagcagatcgagacggcggtcacattctaagtctaggagtcggcgacgatccaaaagcccaaggcggagaagatctcattccagagaaagaggtagaaggtcaaggagcacatcaaaaacaagagacaaaaagaaagaagacaaagaaaagaaacgttctaaaacaccaccaaaaagttacagcacagccagacgttctagaagtgcaagcagagagagacgacgacgaagaagcaggagtggcacaagatctcctaaaaagcctcggtctcctaaaagaaaattgtcccgctcaccatcccctaggagacataaaaaggagaagaagaaagataaagacaaagaaagaagtagggatgaaagagaacgatcaacaagcaagaagaagaagagtaaagataaggaaaaggaccgggaaagaaaatcagagagtgataaagatgtaaaacaggttacacgggattatgatgaagaggaacaggggtatgacagtgagaaagagaaaaaagaagagaagaaaccaatagaaacaggttcccctaaaacaaaggaacgttctgtggaaaagggaactggtgattcactaagagaatccaaagtgaatggggatgatcatcatgaagaagacatggatatgagtgactga

SEQ ID NO: 741 - DNA, 537 bp, Homo Sapiens
atgtcggaggtgcggctgccaccgctacgcgccctggacgactttgttctggggtcggcgcgtctggcggctccggatccatgcgacccgcagcgatggtgccaccgcgtcatcaacaacctcctctactaccaaaccaactaccttctctgcttcggcatcggcctcgctctcgccgggtacgtgcggccacttcatacgctcctgagcgcgctggtagtggcggtggccctcggcgtgctggtgtgggcagctgagacccgcgcagctgtgcgccgctgccgccgcagccaccctgcagcctgcctggccgcagtgcttgccgtcggcctcctggtgctctgggtcgcgggcggcgcttgcaccttcctgttcagcatcgccgggccggtgcttctgatcctggtgcacgcctcgttgcgcctgcgcaaccttaagaacaagattgagaacaagatcgagagcattggtctcaagcggacgccaatgggcctgctactagaggcactgggacaagagcaggaggctggatcctag

SEQ ID NO: 742 - DNA, 1785 bp, Homo Sapiens
atggcggcggccgtgcttagggattcgacttcggttcccgtgactgcagaagctaaacttatgggctttacacagggctgtgtgacctttgaggacgtggccatttacttctcccaggaagaatgggggctccttgatgaggctcagaggctcctgtaccgcgatgtgatgctggagaactttgcacttataactgcgctggtttgttggcatgggatggaggatgaagagacacctgagcaaagtgtttctgtagaaggagtacctcaggtcaggactccagaggccagtccatccacccagaagattcaatcctgtgacatgtgtgtcccattcctgaccgacattttgcacctgaccgatttgcctgggcaggaactatacttgactggggcatgtgcggtctttcaccaggaccagaagcatcatagtgcagagaaacccttggaaagtgacatggacaaggcctcatttgtgcagtgctgcctgttccatgagtcaggaatgcctttcaccagcagtgaggttgggaaggacttcctagccccattgggcattcttcagccgcaagctattgctaactatgagaagccaaacaaaatcagcaaatgtgaggaggcctttcatgttggaataagtcattacaagtggagtcaatgcaggagagagtccagccacaaacacactttttttcaccctagagtctgcactggaaaaaggctttatgaatctagcaaatgtgggaaagcctgctgctgtgagtgctcccttgttcagctgcaaagagtccaccctggagaaaggccttatgagtgcagtgaatgtgggaaatcttttagccaaacctctcatctgaatgatcatcggagaatccacactggagaaaggccttatgtgtgtggtcagtgtgggaaatcatttagccaaagagccaccctcattaaacatcacagagttcacactggagaaaggccttacgagtgtggtgaatgtgggaaatcttttagccaaagttccaaccttattgaacattgcagaattcacactggagaaaggccttatgagtgtgatgaatgtggaaaagcctttgggtccaaatccactcttgttcgacaccagagaactcacacaggagaaaagccatatgagtgtggtgaatgtgggaaattattcagacaaagcttcagccttgttgtacaccagagaattcacactacagcaaggccttatgagtgtggccagtgtgggaaatcatttagcctaaagtgtggcctcattcagcaccagttaattcacagtggagctaggccctttgagtgtgatgagtgcggaaaatcctttagccaaagaaccaccctcaataaacaccacaaagttcacactgcagaaaggccttatgtatgtggggaatgtgggaaagcttttatgttcaaatctaaacttgttaggcaccagagaactcacactggagaaaggccttttgagtgcagtgaatgtgggaaattttttagacaaagctataccctcgttgaacaccagaaaattcacactggattaaggccttacgactgtggacagtgcgggaaatcctttatccaaaagtctagcctcattcaacaccaagtggttcacacaggagaaaggccatatgagtgtggcaaatgtgggaagtcctttacacaacactctggcctcattctccaccgaaaatctcacactgtggagaggcctcgtgacagcagcaaatgtggaaaaccctacagcccaagatctaacattgtttaa

SEQ ID NO: 743 - DNA, 4179 bp, Homo Sapiens
atggacacggaggatgaccccttgctgcaggatgtgtggctagaggaggagcaggaggaggaagaagcaacgggtgaaacctttttaggggcccagaagccagggccccaacctggggcagggggacagtgttgctggcggcactggcccctggcttcccgacccccagcttcgggcttctggagtaccctgggctgggccttcaccaatccgtgctgtgctgggctggtgctcttcctgggctgcagcatccccatggccctgtcagccttcatgttcctttactacccaccgctggacattgacatctcctacaacgcctttgagatccgcaaccacgaggcctcacagcgtttcgacgctctcactctggcgcttaagtcccagtttggatcctgggggcggaaccggcgcgatttggccgacttcacctccgagacgcttcagcgccttatctcagagcagctgcagcagctgcatctcggcaaccgctcgcggcaagcctcccgagccccccgcgtcatccccgcggcctcactcggtggcccaggcccttaccgggacacttccgcggctcaaaagcccacagccaatcggagcgggcgacttcggcgtgagaccccgcccctggaggatctggcagccaaccagagtgaagacccgcgaaaccagcggctgagcaagaatgggcggtaccagcccagcatcccgccccacgcggcagtcgcggccaatcagagccgtgcccgccgaggcgcctcgcgctgggactactcgcgcgcctatgtgagtgccaacactcagacgcacgcgcactggcgcatcgagctcatcttcctggcgcgcggcgacgcggagcgcaacattttcaccagtgagcgcctggtcacgatccatgagatcgagcgcaagatcatggaccacccaggcttccgggagttctgctggaagccccacgaggtgctcaaggatctgccgctgggctcctactcctactgctcgccccccagctcgctcatgacctacttttttcccaccgagaggggcggcaagatctactatgacggcatgggccaggacctggcggacatccggggctccctggagctggccatgactcaccctgagttctactggtatgtggatgagggcctctctgcagacaatctgaagagctccctcctgcgcagtgagatcctgtttggagcacccctgcccaactactactcagtagatgaccgctgggaggaacaacgggctaagtttcagagcttcgtggtcacctacgtggccatgctggccaagcagtctaccagcaaagtccaggttctctatggggggacagacctgtttgactatgaagtgcgcaggacgttcaacaatgacatgctcctggccttcatcagcagcagctgcattgctgccctggtctacatcctcacctcctgctcagtgttcctgtccttctttgggattgccagcattggtctcagctgcctggtggccctcttcctgtaccacgtggtctttggtatccagtacttgggcatcctgaatggggtggccgccttcgtgatcgtgggcattggtgtggacgatgtctttgtgttcatcaacacctaccgccaggccacccacctggaagacccacagctgcgcatgatccacaccgtccaaactgcaggcaaggccaccttcttcacctccctgaccacagccgccgcctacgcagctaacgtcttctcccagatcccagccgtccacgactttggcctgttcatgtctctcatcgtgtcctgttgctggctggccgtgcttgtcaccatgcctgcagctctgggcctctggagcctctacctggcaccactggagagctcctgccagaccagctgccaccagaattgcagccggaagacctccctgcacttccccggagacgtgtttgccgctcccgagcaggttggaggcagccctgcccagggccccataccctacctggatgatgacatccccttgctggaggtcgaggaagagccagtgtcactggagctgggagacgtgtccctggtgtctgtgtcccccgagggtctgcagccagcctccaacacgggcagccgcggccatctcatcgtgcagctgcaggagctgctgcaccactgggtcctgtggtcagccgtcaagagccgctgggtgattgtggggctgttcgtctccatcctcatcttgtccctggtgttcgccagccggctccgccccgccagccgggccccgctactcttccggcctgataccaacatccaggtgctgctggacctcaagtacaacctgagcgccgagggcatctcctgcatcacctgttcaggtctgttccaggagaagccccacagcctgcagaacaacatccggacgtccctggagaagaagaggcgaggctcaggggtcccctgggctagccggcctgaggccaccctgcaggatttcccaggcaccgtgtacatctctaaagtgaagagtcaaggccaccccgctgtctacaggctctccctcaatgccagcctgcctgctccttggcaggctgtgtcgcctggggatggagaggtgccctccttccaggtgtatagagcgccttttggtaacttcaccaagaagctgaccgcttgtatgtctacagtagggctgctccaggcggcgagcccctcccgcaagtggatgctgacgaccttggcctgtgatgccaagcggggctggaagtttgacttcagcttctacgtggccaccaaggagcagcagcacacccggaagctgtacttcgcccagtcccacaagccccccttccacgggcgcgtatgcatggcaccccctggctgcctgcttagctccagccccgatgggcctaccaaaggcttcttcttcgtgcctagtgagaaagtgcccaaggcccgtctctcagccaccttcggcttcaacccctgcgtgaacacgggctgcgggaagccggcggtgcggccactagtggataccggggccatggtctttgtggtcttcggcattattggcgtcaaccgcactcggcaggtggacaaccacgtcattggagacccgggtagtgttgtctacgacagcagctttgacctcttcaaggaaattgggcacctgtgtcacctctgcaaggccatcgcagccaactccgagctggtgaagccgggtggggcccagtgcctgccttcaggctacagcatctcctccttcctgcagatgttgcaccctgagtgcaaggagctgcccgagcccaacctgctcccggggcagctgtcccacggggcagtgggcgtcagggagggccgcgtgcagtggatctccatggctttcgagtcgaccacgtacaagggcaaatcctccttccagacctactcggactacctgcgctgggagagcttcctccagcagcagctgcaggccttgcccgagggctcagtcctgcgccggggcttccagacctgcgagcactggaagcagatattcatggaaatcgtaggggtgcagagcgccctgtgcggcctggtgctatccctgctcatctgcgtggccgcggtggccgtgttcaccacccacatcctgctcctgctgcccgtgctcctcagcatcttgggcatcgtgtgcctggtggtgaccatcatgtactggagcggctgggagatgggggctgtggaagccatctccctgtccatcctcgttggctcctccgtggattactgcgtccacctggtcgagggctacctgctggctggagagaacctgcccccccaccaggccgaggacgcccgaacgcagcgccagtggcgtacgctggaggccgtgcggcacgtgggcgtggccatcgtctccagtgccctcaccacggtcatcgccacagtgcccctcttcttctgcatcatcgccccatttgccaagttcggcaagattgtggcactcaacacgggcgtgtccatcctctacacgctgaccgtcagcaccgccctgctgggcatcatggcgcccagctctttcactcggacccggacttccttcctcaaggccctgggtgccgtgctgctggcaggggccctggggctgggtgcctgcctcgtgctcctgcagagcggctataagattcccctgcccgcaggggcctccctatag

SEQ ID NO: 744 - DNA, 1332 bp, Homo Sapiens
atgggcggcccgcgggcttgggcgctgctctgcctcgggctcctgctcccgggaggcggcgctgcgtggagcatcggggcagctccgttctccggacgcaggaactggtgctcctatgtggtgacccgcaccatctcatgccatgtgcagaatggcacctaccttcagcgagtgctgcagaactgcccctggcccatgagctgtccggggagcagctacagaactgtggtgagacccacatacaaggtgatgtacaagatagtgaccgcccgtgagtggaggtgctgccctgggcactcaggagtgagctgcgaggaagttgcagcttcctctgcctccttggagcccatgtggtcgggcagtaccatgcggcggatggcgcttcggcccacagccttctcaggttgtctcaactgcagcaaagtgtcagagctgacagagcggctgaaggtgctggaggccaagatgaccatgctgactgtcatagagcagccagtacctccaacaccagctacccctgaggaccctgccccgctctggggtccccctcctgcccagggcagccccggagatggaggcctccaggaccaagtcggtgcttgggggcttcccgggcccaccggccccaagggagatgccggcagtcggggcccaatggggatgagaggcccaccaggtccacagggccccccagggagccctggccgggctggagctgtgggcacccctggagagaggggacctcctgggccaccagggcctcctggcccccctgggcccccagcccctgttgggccaccccatgcccggatctcccagcatggagacccattgctgtccaacaccttcactgagaccaacaaccactggccccagggacccactgggcctccaggccctccagggcccatgggtccccctgggcctcctggccccacaggtgtccctgggagtcctggtcacataggacccccaggccccactggacccaaaggaatctctggccacccaggagagaagggcgagagaggactgcgtggggagcctggcccccaaggctctgctgggcagcggggggaacctggccctaagggagaccctggtgagaagagccactggggggaggggttgcaccagctacgcgaggctttgaagattttagctgagagggttttaatcttggaaacaatgattgggctctatgaaccagagctggggtctggggcgggccctgccggcacaggcacccccagcctccttcggggcaagaggggcggacatgcaaccaactaccggatcgtggcccccaggagccgggacgagagaggctga

SEQ ID NO: 745 - DNA, 543 bp, Homo Sapiens
atgggcctcactatctcctccctcttctcccgactatttggcaagaagcagatgcgcattttgatggttggattggatgctgctggcaagacaaccattctgtataaactgaagttaggggagatagtcaccaccattcctaccattggttttaatgtggaaacagtagaatataagaacatttgtttcacagtatgggatgttggtggtcaagatagaattaggcctctctggaagcattacttccagaatacccagggtcttatttttgtggtagatagcaacgatcgtgaaagaattcaggaagtagcagatgagctgcagaaaatgcttctggtagatgaattgagagatgcagtgctgctactttttgcaaacaaacaggatttgccaaatgctatggccatcagtgaaatgacagataaactagggcttcagtctcttcgtaacagaacatggtatgttcaagccacttgtgcaacacaaggaactggtctgtatgaaggacttgactggctgtcaaatgagctttcaaaacgttaa

SEQ ID NO: 746 - DNA, 327 bp, Homo Sapiens
atggctgtaactggagatgacacagctgccactggtgacatgccaacttaccagatccgagctcctactgctgctttgccacagggagtggtgatggctgcatcgcccggaagtttgcacagtccccagcagctggcagaagaagcaacacgcaaacgagagctgaggctaatgaaaaacagggaagctgcccgggagtgtcgcaggaagaagaaagaatatgtcaaatgtcttgaaaatcgtgtggctgtgcttgaaaaccaaaacaagactctcattgaggaactcaaggccctcaaagatctttattgccataaagtagagtaa

SEQ ID NO: 747 - DNA, 1251 bp, Homo Sapiens
atggagctacgtgtggggaacaagtaccgcctgggacggaagatcgggagcgggtccttcggagatatctacctgggtgccaacatcgcctctggtgaggaagtcgccatcaagctggagtgtgtgaagacaaagcacccccagctgcacatcgagagcaagttctacaagatgatgcagggtggcgtggggatcccgtccatcaagtggtgcggagctgagggcgactacaacgtgatggtcatggagctgctggggcctagcctcgaggacctgttcaacttctgttcccgcaaattcagcctcaagacggtgctgctcttggccgaccagatgatcagccgcatcgagtatatccactccaagaacttcatccaccgggacgtcaagcccgacaacttcctcatggggctggggaagaagggcaacctggtctacatcatcgacttcggcctggccaagaagtaccgggacgcccgcacccaccagcacattccctaccgggaaaacaagaacctgaccggcacggcccgctacgcttccatcaacacgcacctgggcattgagcaaagccgtcgagatgacctggagagcctgggctacgtgctcatgtacttcaacctgggctccctgccctggcaggggctcaaagcagccaccaagcgccagaagtatgaacggatcagcgagaagaagatgtcaacgcccatcgaggtcctctgcaaaggctatccctccgaattctcaacatacctcaacttctgccgctccctgcggtttgacgacaagcccgactactcttacctacgtcagctcttccgcaacctcttccaccggcagggcttctcctatgactacgtctttgactggaacatgctgaaattcggtgcagcccggaatcccgaggatgtggaccgggagcggcgagaacacgaacgcgaggagaggatggggcagctacgggggtccgcgacccgagccctgccccctggcccacccacgggggccactgccaaccggctccgcagtgccgccgagcccgtggcttccacgccagcctcccgcatccagccggctggcaatacttctcccagagcgatctcgcgggtcgaccgggagaggaaggtgagtatgaggctgcacaggggtgcgcccgccaacgtctcctcctcagacctcactgggcggcaagaggtctcccggatcccagcctcacagacaagtgtgccatttgaccatctcgggaagtga

SEQ ID NO: 748 - DNA, 1023 bp, Homo Sapiens
atgagtgagctggagcaactgagacaggaggccgagcagctccggaaccagatccgggatgcccgaaaagcatgtggggactcaacactgacccagatcacagctgggctggacccagtggggagaatccagatgaggacccggaggaccctccgtgggcacctggcaaagatctatgccatgcactgggggaccgactcaaggctgctggtcagcgcctcccaggatgggaagctcatcatctgggacagctacaccaccaacaaggtccacgccatcccgctgcgctcctcctgggtaatgacctgtgcctacgcgccctcagggaactttgtggcctgtggggggttggacaacatctgctccatctacagcctcaagacccgcgagggcaacgtcagggtcagccgggagctgcctggccacactgggtacctgtcgtgttgccgcttcctggatgacaaccaaatcatcaccagctctggggataccacctgtgccctgtgggacattgagacaggccagcagacagtgggttttgctggacacagtggggatgtgatgtccctgtccctggcccccgatggccgcacgtttgtgtcaggcgcctgtgatgcctctatcaagctgtgggacgtgcgggattccatgtgccgacagaccttcatcggccatgaatccgacatcaatgcagtggctttcttccccaacggctacgccttcaccaccggctctgacgacgccacgtgccgcctcttcgacctgcgggccgatcaggagctcctcatgtactcccatgacaacatcatctgtggcatcacctctgttgccttctcgcgcagcggacggctgctgctcgctggctacgacgacttcaactgcaacatctgggatgccatgaagggcgaccgtgcaggagtcctcgctggccacgacaaccgcgtgagctgcctcggggtcaccgacgatggcatggctgtggccacgggctcctgggactccttcctcaagatctggaactaa

SEQ ID NO: 749 - DNA, 2718 bp, Homo Sapiens
atggcaaaaagagccctgcatgattttattgacaagtatctctatgccatgcggctctccgatgaaactctcatagatatcatgactcgcttcaggaaggagatgaagaatggcctctcccgggattttaatccaacagccacagtcaagatgttgccaacattcgtaaggtccattcctgatggctctgaaaagggagatttcattgccctggatcttggtgggtcttcctttcgaattctgcgggtgcaagtgaatcatgagaaaaaccagaatgttcacatggagtccgaggtttatgacaccccagagaacatcgtgcacggcagtggaagccagctttttgatcatgttgctgagtgcctgggagatttcatggagaaaaggaagatcaaggacaagaagttacctgtgggattcacgttttcttttccttgccaacaatccaaaatagatgaggccatcctgatcacctggacaaagcgatttaaagcgagcggagtggaaggagcagatgtggtcaaactgcttaacaaagccatcaaaaagcgaggggactatgatgccaacatcgtagctgtggtgaatgacacagtgggcaccatgatgacctgtggctatgacgaccagcactgtgaagtcggcctgatcatcggcactggcaccaatgcttgctacatggaggaactgaggcacattgatctggtggaaggagacgaggggaggatgtgtatcaatacagaatggggagcctttggagacgatggatcattagaagacatccggacagagtttgacagggagatagaccggggatccctcaaccctggaaaacagctgtttgagaagatggtcagtggcatgtacttgggagagctggttcgactgatcctagtcaagatggccaaggagggcctcttatttgaagggcggatcaccccggagctgctcacccgagggaagtttaacaccagtgatgtgtcagccatcgaaaagaataaggaaggcctccacaatgccaaagaaatcctgacccgcctgggagtggagccgtccgatgatgactgtgtctcagtccagcacgtttgcaccattgtctcatttcgctcagccaacttggtggctgccacactgggcgccatcttgaaccgcctgcgtgataacaagggcacacccaggctgcggaccacggttggtgtcgacggatctctttacaagacgcacccacagtattcccggcgtttccacaagactctaaggcgcttggtgccagactccgatgtgcgcttcctcctctcggagagtggcagcggcaagggggctgccatggtgacggcggtggcctaccgcttggccgagcagcaccggcagatagaggagaccctggctcatttccacctcaccaaggacatgctgctggaggtgaagaagaggatgcgggccgagatggagctggggctgaggaagcagacgcacaacaatgccgtggttaagatgctgccctccttcgtccggagaactcccgacgggaccgagaatggtgacttcttggccctggatcttggaggaaccaatttccgtgtgctgctggtgaaaatccgtagtgggaaaaagagaacggtggaaatgcacaacaagatctacgccattcctattgaaatcatgcagggcactggggaagagctgtttgatcacattgtctcctgcatctctgacttcttggactacatggggatcaaaggccccaggatgcctctgggcttcacgttctcatttccctgccagcagacgagtctggacgcgggaatcttgatcacgtggacaaagggttttaaggcaacagactgcgtgggccacgatgtagtcaccttactaagggatgcgataaaaaggagagaggaatttgacctggacgtggtggctgtggtcaacgacacagtgggcaccatgatgacctgtgcttatgaggagcccacctgtgaggttggactcattgttgggaccggcagcaatgcctgctacatggaggagatgaagaacgtggagatggtggagggggaccaggggcagatgtgcatcaacatggagtggggggcctttggggacaacgggtgtctggatgatatcaggacacactacgacagactggtggacgaatattccctaaatgctgggaaacaaaggtatgagaagatgatcagtggtatgtacctgggtgaaatcgtccgcaacatcttaatcgacttcaccaagaagggattcctcttccgagggcagatctctgagacgctgaagacccggggcatctttgagaccaagtttctctctcagatcgagagtgaccgattagcactgctccaggtccgggctatcctccagcagctaggtctgaatagcacctgcgatgacagtatcctcgtcaagacagtgtgcggggtggtgtccaggagggccgcacagctgtgtggcgcaggcatggctgcggttgtggataagatccgcgagaacagaggactggaccgtctgaatgtgactgtgggagtggacgggacactctacaagcttcatccacacttctccagaatcatgcaccagacggtgaaggaactgtcaccaaaatgtaacgtgtccttcctcctgtctgaggatggcagcggcaagggggccgccctcatcacggccgtgggcgtgcggttacgcacagaggcaagcagctaa

SEQ ID NO: 750 - DNA, 741 bp, Homo Sapiens
atgtaccaggtgagcggccagcgcccctctggctgcgacgcgccctatggagcccccagcgcagccccgggcccagcccagaccctatccctccttcctgggctggaggtagtaacaggatccactcaccctgcggaggcagcaccagaggagggctccctggaggaggcggcaacccccatgccccaaggcaatggccctggcatcccccagggcctggacagcactgacctcgacgtccccacagaagctgtgacatgccagcctcaggggaaccccttgggctgcaccccacttctgccgaatgactctggccacccctcagagctgggcggcaccagacgggcggggaatggtgccctgggtggccccaaggcccaccggaagttgcagacacacccatctctcgccagccagggcagcaagaagagtaagagcagcagcaaatccaccacctcccagatccccctccaggcacaggaagactgctgtgtccactgcatcctgtcctgcctgttctgcgagttcctgacgctgtgcaacatcgtcctggactgcgccacctgtggctcctgcagctcggaggactcgtgcctctgctgctgctgctgtggctctggcgagtgtgccgactgcgacctgccctgcgacctggactgcggcatcctggatgcctgctgcgagtccgcggactgcctggagatctgcatggagtgctgtgggctctgcttctcctcctga

SEQ ID NO: 751 - DNA, 471 bp, Homo Sapiens
atgcccatggcggggcttctaaaggggcttgtacggcaactggagcggttcagcgttcaacaacaagcttccaagatgccgcccaaaggaaaaagtggttctggaaaagcggggaaagggggagcagcctctgggagtgacagtgctgacaagaaggctcaaggtcccaaaggtggtggcaatgcagtaaaggtcagacacattctatgtgaaaaacatggcaaaatcatggaagccatggaaaagttaaagtctgggatgagattcaatgaagtggccgcacagtatagtgaagataaagccaggcaagggggtgacttgggttggatgaccagagggtccatggtgggaccatttcaagaagcagcatttgccttgcctgtaagtgggatggataagcctgtgtttacagacccaccggttaagacaaaatttggatatcatattattatggtcgaaggaagaaaataa

SEQ ID NO: 752 - DNA, 1122 bp, Homo Sapiens
atgttgttgggactggcggccatggagctgaaggtgtgggtggatggcatccagcgtgtggtctgtggggtctcagagcagaccacctgccaggaagtggtcatcgcactagcccaagcaataggccagactggccgctttgtgcttgtgcagcggcttcgggagaaggagcggcagttgctgccacaagagtgtccagtgggcgcccaggccacctgcggacagtttgccagcgatgtccagtttgtcctgaggcgcacagggcccagcctagctgggaggccctcctcagacagctgtccacccccggaacgctgcctaattcgtgccagcctccctgtaaagccacgggctgcgctgggctgtgagccccgcaaaacactgacccccgagccagcccccagcctctcacgccctgggcctgcggcccctgtgacacccacaccaggctgctgcacagacctgcggggcctggagctcagggtgcagaggaatgctgaggagctgggccatgaggccttctgggagcaagagctgcgccgggagcaggcccgggagcgagagggacaggcacgcctgcaggcactaagtgcggccactgctgagcatgccgcccggctgcaggccctggacgctcaggcccgtgccctggaggctgagctgcagctggcagcggaggcccctgggcccccctcacctatggcatctgccactgagcgcctgcaccaggacctggctgttcaggagcggcagagtgcggaggtgcagggcagcctggctctggtgagccgggccctggaggcagcagagcgagccttgcaggctcaggctcaggagctggaggagctgaaccgagagctccgtcagtgcaacctgcagcagttcatccagcagaccggggctgcgctgccaccgcccccacggcctgacaggggccctcctggcactcagggccctctgcctccagccagagaggagtccctcctgggcgctccctctgagtcccatgctggtgcccagcctaggccccgaggtggcccccatgacgcagaactcctggaggtagcagcagctcctgccccagagtggtgtcctctggcagcccagccccaggctctgtga

SEQ ID NO: 753 - DNA, 1587 bp, Homo Sapiens
atgggggacgctcccagccctgaagagaaactgcaccttatcacccggaacctgcaggaggttctgggggaagagaagctgaaggagatactgaaggagcgggaacttaaaatttactggggaacggcaaccacgggcaaaccacatgtggcttactttgtgcccatgtcaaagattgcagacttcttaaaggcagggtgtgaggtaacaattctgtttgcggacctccacgcatacctggataacatgaaagccccatgggaacttctagaactccgagtcagttactatgagaatgtgatcaaagcaatgctggagagcattggtgtgcccttggagaagctcaagttcatcaaaggcactgattaccagctcagcaaagagtacacactagatgtgtacagactctcctccgtggtcacacagcacgattccaagaaggctggagctgaggtggtaaagcaggtggagcaccctttgctgagtggcctcttataccccggactgcaggctttggatgaagagtatttaaaagtagatgcccaatttggaggcattgatcagagaaagattttcacctttgcagagaagtacctccctgcacttggctattcaaaacgggtccatctgatgaatcctatggttccaggattaacaggcagcaaaatgagctcttcagaagaggagtccaagattgatctccttgatcggaaggaggatgtgaagaaaaaactgaagaaggccttctgtgagccaggaaatgtggagaacaatggggttctgtccttcatcaagcatgtcctttttccccttaagtccgagtttgtgatcctacgagatgagaaatggggtggaaacaaaacctacacagcttacgtggacctggaaaaggactttgctgctgaggttgtacatcctggagacctgaagaattctgttgaagtcgcactgaacaagttgctggatccaatccgggaaaagtttaatacccctgccctgaaaaaactggccagcgctgcctacccagatccctcaaagcagaagccaatggccaaaggccctgccaagaattcagaaccagaggaggtcatcccatcccggctggatatccgtgtggggaaaatcatcactgtggagaagcacccagatgcagacagcctgtatgtagagaagattgacgtgggggaagctgaaccacggactgtggtgagcggcctggtacagttcgtgcccaaggaggaactgcaggacaggctggtagtggtgctgtgcaacctgaaaccccagaagatgagaggagtcgagtcccaaggcatgcttctgtgtgcttctatagaagggataaaccgccaggttgaacctctggaccctccggcaggctctgctcctggtgagcacgtgtttgtgaagggctatgaaaagggccaaccagatgaggagctcaagcccaagaagaaagtcttcgagaagttgcaggctgacttcaaaatttctgaggagtgcatcgcacagtggaagcaaaccaacttcatgaccaagctgggctccatttcctgtaaatcgctgaaaggggggaacattagctag

SEQ ID NO: 754 - DNA, 690 bp, Homo Sapiens
atgggtaacgccagctttggctccaaggaacagaagctgctgaagcggttgcggcttctgcccgccctgcttatcctccgcgccttcaagccccacaggaagatcagagattaccgcgtcgtggtagtcggcaccgctggtgtggggaaaagtacgctgctgcacaagtgggcgagcggcaacttccgtcatgagtacctgccgaccattgaaaatacctactgccagttgctgggctgcagccacggtgtgctttccctgcacatcaccgacagcaagagtggcgacggcaaccgcgctctgcagcgccacgttatagcccggggccacgccttcgtcctggtctactcagtcaccaagaaggaaaccctggaagagctgaaggccttctatgagctgatctgcaagatcaaaggtaacaacctgcataagttccccatcgtgctggtgggcaataaaagtgatgacacccaccgggaggtggccctgaatgatggtgccacctgtgcgatggagtggaattgcgccttcatggagatttcagccaagaccgatgtgaatgtgcaggagctgttccacatgctgctgaattacaagaaaaagcccaccaccggcctccaggagcccgagaagaaatcccagatgcccaacaccactgagaagctgcttgacaagtgcataatcatgtga

SEQ ID NO: 755 - DNA, 5649 bp, Homo Sapiens
atggtcggccgcggcgtccctctgtgcgctgcgcagcccgcggtggccgagggcggcccggcccgcgagccgccgccgctgctggaggtgtccccccgaaagaggctacccgccgggcccgaccaggacccatgcggcagccgccctgctcccgaaggcgccggggccggcccagagcagggccactcggccggcggaggcggctggtgccgccactgccacacgaagctggtggagctcaagcgacaggcgtggaagctggtcagcgggcccgggaccaccctccgggatccttgcctctctgccctgcttctcgacaagctaccagcacctggggccctgccagcctgtcgcccagaggccgagcgccgctgtgacgtctgcgccacacacctgcagcagctcacacgggaggccatgcacctgctgcaggcccctgccagccatgaggaccttgacgccccccatggaggccccagcctcgcaccccccagcaccacgaccagctcgagggacacgccaggaccagcgggtcctgcagggaggcagccaggacgagctgggccagacaggaccaaggggctggcctggtcccccgggcccagtgtccaggtgtctgtagcacctgcgggtcttggaggggcgctgagcacggtcaccatccaggcccagcagtgcctggagggcatgtggagtgtctcgcgggtcaacagcttcctcccgccggcgtgcctggccgaggcagcggtggcggccgtggcggtggcagacacggtccgagaatgcccccccgtggccggccctgatggcttgtcgaaggcctggggccgtggtggagtctgcacgtcagccctggtcacccccaccccgggctcggtggggggctccacaggcccctcagctgcagcctccttcttcataagggctatgcagaagctcagcctggcctccaagaggaagaagccccacccgccaccgcctccagccacccgcggcacctccacctaccccaccgacttcagcggggtcctgcagctgtggccgcccccggcgcccccctgcctgctcagggccgcctccaagaccaaggacaaccctggcagcatcgggaaggtgaaggttatgctgcggatctggcccgcacagggggcccagcgctcggccgaggccatgtccttcctgaaggtggaccctcggaagaagcaggtgatcctctacgatcccgccgccggtcccccaggcagcgcaggcccccggcgagccgccactgctgcagttcccaagatgtttgccttcgatgccgtcttcccccaggactccgagcaggccgaagtctgctcggggaccgtggccgacgtgctccagtcggtggtcagtggggctgatggctgcattttttcctttggccacatgagcctgggcaagtcgtacaccatgatcgggaaggacagctcaccccagagcctgggcatcgtgccctgcgccatctcctggctcttcaggctcatcgaggagcgcagggagaggacgggcacccgcttctccgtccgggtctcagccgtggaggtgtgcgggcgcgaccagagcctgcgggacctgctggccgaggtggcccctggcagcctccaggacacccagtctccgggagtgtacctgcgggaggaccccgtgtgtggggcgcagctccagaaccaaagcgagctgcgggcacccacggccgagaaggcggctttctacctggatgcggccctggcggcccgcagcaccagccgagcgggctgtggcgaggacgcccgacgcagctcccacatgttgttcacgctgcacgtctaccagtaccgcatggagaagtgcggccggggaggaatgtccggaggccgcagccgcctgcacctcatcgacctgggcagctgtgaggcggcggctggcagggccggggaggctgctgggggtcccctgtgtctgtccctgtcggccctgggcagcgtcatcttggccctggtcaacggagccaagcatgtgccgtatcgggaccacaggctcaccatgctgctgcgtgaatccctggccaccgctggctgccgcaccaccatgatcgcccacgtgtcggatgcgccagcccagcacgcagagacactcagcaccgtgcagctcgccgcccgcatccaccgcctgcgcaggaagaaggccaagtacgcctccagctcctctggcggggagagctcctgtgaggaaggccgggcccgtcggcccccgcacctgcggcccttccacccacgcactgtggccctggaccccgaccgcacgcctccctgcctgcccggtgaccccgattactcctccagcagcgagcagtcctgtgacacggtcatctacgtggggcccggtggggcggcgctgtcagaccgggagctcaccgacaacgaaggtccgcctgacttcgtgcccatcatccctgccctgagccgccaccggccctccaagggtccccgagacgcagaccacttccgctgcagcaccttcgcggagctgcaggagcggctggaatgcatggacggcaacgagggtccctcaggaggtccaggtggcaccgacggagctcaggccagccccgcccgagggggccggaagccctcgccaccagaggctgcatcccccaggaaggccgtgggcaccccgatggctgccagcacccctcgaggcagttctggtccagacacccaccagggtacccctgagccctgcaaggccattgtctggggtgaccagagagaggacagcagcgcttggcctgagctgctggtcccggaaaaggctgcagtgagtggaggcaggaggccactgcccagcccggctcccccacctcctcagttgctggaagcctgcagagccccagaagagcctgggggagggggcactgatggagtggcacggacccctcccgtgggcatgagtgggcaggtggctgggtccccgatgcttcctggggccacctgcccccgcctggctgctggcagtcgctgtccggagcggggcctgctcaccaccacagtgaccctgcagcggccagtggagctcaacggcgaggacgagctggtgttcacggtggtggaggagctgtccctgggggcgcttgccggagctgggcggcccaccagcctggctagcttcgacagtgactgctccctgcgggccctggcctcggggtcccggccagtcagcatcatcagcagcatcaatgatgagtttgacgcctacacctctcaggcccctgagggggggcccctggagggggcagcctgggccggcagcagtcacggctcctccatcagctcctggctcagcgaggtcagcgtctgcactgccgacagccgtgaccccacgccgcagccccgcttcagccccgactcgctggcagggcttgaccctgggggcccccctgccctggatggttccctgggggatggaagctctgggttcctggggccagacagacctgacagtcctgggccaacctggggtccgtgccctggggaagtggctgcagtggccccatcccgacccggcagggagccccaggccgggccctcgcggtgggcatccgcagcccagaccatccactccagcctcccccggaaaccgaggactgcctctgccaccacccgtgtgggctgtgctcgcctgggccagagcccacctggccgtggaggcctgtttgaggacccatggctgctccgggtaggggagtgtgatacccaggcagcttctgctggcagggcccccagccccacacttggctccccccggctgcctgaggcccaggtgatgctagcctgtgcccagagagtggtggacgggtgtgaggtggcagccagggcggcccgcaggccagaggctgtggctcggatcccaccgctgcggaggggtgccaccacgctgggtgtgacaacgccagctgtgtcctggggagatgctcccacggaggtggtggcctgctcggggagcctgaaggcctcccccaccagcaagaagggtctggctcccaaggcgggcttcctcccgaggcccagtggggcggcccccccggccccacccacgcggaagtccagcctggagcagaggagcagcccggcctcggcccctccgcatgctgtgaacccggcgcgggtcggggctgctgctgtccttcgaggggaggaggagcccagacccagcagccgggctgaccactctgtccccagggccacgtccagcctgaaggcccgggccagcaaggtagaagcagcacaccgtcttgccggacacgcgtctctggagcggtacgaaggcctggcgcacagcagcagcaagggccgggaagcccctgggcggcctccccgggctgtacccaagctgggtgtgccaccctccagccccacacacggtccagctcccgcctgtaggagcggcgcagccaaggctgtgggggcccccaagccccctgttggtggaggcaagggccgtggcctagtggctggtgggtcgcgggctctggggccttcggtgaagctgtctacggcctctgtgacgggcaggagccctggcggccctgtggccggtcccagagcagccccacgggccgggcccagtgtcggggcgaaggctggccggggtaccgtcatgggcacaaagcaggcgctccgggctgctcacagccgcgtccatgagctgtcagccagtggagccccgggccgaggtggctcctcgtggggctcggcggactcagacagcggccatgacagcggcgtgaacgtgggggaggagcggccacccacgggcccggccctgccctccccctacagcaaggtgaccgccccacggcggccccagcgctacagcagcggccatggcagcgacaacagcagcgtgctgagtggagagctgccgcccgccatgggccgcaccgcccttttccaccacagcggtggcagcagtggctatgagagcctgcggcgcgacagcgaggccaccggcagcgcctcctccgcccctgactccatgagcgagagtggggctgcctccccaggcgcccgcacccgcagcctcaagtcccccaagaagagggccacaggtctgcagcggcggcgcctgattcccgccccactgcccgacaccactgccctgggccgtaagcccagcctccccgggcagtgggtggacctgcccccgcccctggctggctccctgaaggagccgttcgagatcaaggtgtacgagatcgatgacgtggagcgccttcagcggccccgccccaccccgagggaggcccccacccagggtctggcgtgcgtcagtacaaggctgcggctggcggagcgcaggcagcagcggctgcgggaggtgcaggccaagcacaagcacctgtgtgaggagctggccgagacccagggccggctgatgctggagcctggccgctggctggagcagtttgaggtggacccggagctggagcccgagtcggccgagtacctggcggccctggagcgagccacggcggccctggagcagtgcgtgaacctgtgcaaggcgcacgtcatgatggtcacctgcttcgacatcagcgttgcagccagtgctgccatcccggggccgcaggaggtggacgtctga

SEQ ID NO: 756 - DNA, 1281 bp, Homo Sapiens
atgagcgggggcgtctacggcggagatgaggtgggggcgctggtctttgacattggctccttctcagtccgcgctgggtacgctggggaggactgtcccaaggctgacttccccaccacagtggggctgctggccgcggaggaggggggcgggctggagctggagggggacaaagagaagaaagggaagatcttccacatcgacaccaatgccctgcacgtgcctcgggatggagcggaggtcatgtcgcccctcaagaatggcatgatcgaggactgggagtgcttccgagccatcctggatcacacctacagcaaacacgtcaagtctgagccaaacctgcacccagtgctcatgtccgaggctccgtggaacacacgggccaagcgggagaagctgacagagctgatgttcgagcagtacaacattcctgccttcttcttatgcaagacggctgtgctcaccgcctttgcaaacgggcggtccactggcctcgtgctggacagtggagccacccacaccacggccattccagtacatgacggctacgttctgcagcaaggcatcgtcaagtcccctctggcaggggacttcatctccatgcagtgccgggagctgttccaggagatggccattgacatcatcccaccttacatgatcgcagccaaggagcctgtccgggagggtgcccccccaaactggaagaagaaggagaagctaccccaggtctccaagtcctggcataactacatgtgtaatgaggtgatccaggacttccaggcctccgtgctgcaggtctcagactccccctacgatgaacaggtggctgcacaaatgcccacagtgcactacgagatgcccaatggctacaatacagactacggcgccgagcgactccgcatccctgagggcctgtttgatccctcgaacgtcaagggcctgtcggggaacaccatgttgggtgtgggccacgtggtgaccaccagcatcggcatgtgtgacattgatattcgcccgggcctgtacgggagtgtcattgtcaccggcgggaacacactgctgcagggcttcactgacaggctcaatcgagagctttcccagaagaccccaccgagcatgcgactgaaactcattgccagcaacagcaccatggagcgcaagttcagcccctggatcgggggttccatcctggcctcactgggcactttccagcagatgtggatctccaagcaggaatatgaggagggcgggaagcagtgcgtggagcgaaagtgcccctga

SEQ ID NO: 757 - DNA, 918 bp, Homo Sapiens
atggggatccagacgagccccgtcctgctggcctccctgggggtggggctggtcactctgctcggcctggctgtgggctcctacttggttcggaggtcccgccggcctcaggtcactctcctggaccccaatgaaaagtacctgctacgactgctagacaagacgactgtgagccacaacaccaagaggttccgctttgccctgcccaccgcccaccacactctggggctgcctgtgggcaaacatatctacctctccacccgaattgatggcagcctggtcatcaggccatacactcctgtcaccagtgatgaggatcaaggctatgtggatcttgtcatcaaggtctacctgaagggtgtgcaccccaaatttcctgagggagggaagatgtctcagtacctggatagcctgaaggttggggatgtggtggagtttcgggggccaagcgggttgctcacttacactggaaaagggcattttaacattcagcccaacaagaaatctccaccagaaccccgagtggcgaagaaactgggaatgattgccggcgggacaggaatcaccccaatgctacagctgatccgggccatcctgaaagtccctgaagatccaacccagtgctttctgctttttgccaaccagacagaaaaggatatcatcttgcgggaggacttagaggaactgcaggcccgctatcccaatcgctttaagctctggttcactctggatcatcccccaaaagattgggcctacagcaagggctttgtgactgccgacatgatccgggaacacctgcccgctccaggggatgatgtgctggtactgctttgtgggccacccccaatggtgcagctggcctgccatcccaacttggacaaactgggctactcacaaaagatgcgattcacctactga

SEQ ID NO: 758 - DNA, 747 bp, Homo Sapiens
atgcgcctcattcagaacatgtgcaccatcgccgagtaccccgcgccgggcaacgccgcggcctccgactgctgtgtgggcgccgccggccgccgcctggtcaagatcgccgtggtgggcgccagcggcgtgggcaagaccgcactggtggtccggttcctcaccaaacgattcatcggtgactatgaaagaaatgcaggtaatctctatactagacaagttcagatagaaggtgaaaccctggctcttcaggttcaagacactccaggtattcaggtccatgagaacagcctgagctgcagtgaacagctgaataggtgcattcgctgggcagatgctgtggtgatcgttttctccatcactgactacaagagctatgaactcatcagccagctccaccagcacgtgcagcagctacacctgggcacccggctgcctgtggtggtcgtggccaacaaagctgacctgttgcacatcaaacaggttgaccctcagcttggactgcagctagccagcatgctaggctgctcattctatgaagtgtctgtcagtgaaaattataatgatgtctacagcgccttccacgtcctctgtaaagaggtcagtcacaaacagcagcctagcagtacacccgagaagcgaagaacctccctcattcccaggcccaagtcacccaacatgcaggacctgaagaggaggtttaagcaagccctctctgccaaagtgaggactgtcacctccgtctga

SEQ ID NO: 759 - DNA, 2145 bp, Homo Sapiens
atggcccgggcgggcagctgcggcggcgccgcggcgggcgcagggcggccggagccctgggagctgtccctggaggaggtgctgaaggcctacgagcagccgctcaacgaggagcaggcgtgggccgtgtgcttccagggctgccgcgggctgcggggctcgccgggccggcgcctgcgggataccggggacctcctgctgcgcggggacggctcggtcggggcgcgggagcccgaggccgcggaacctgcaaccatggtcgtgccactagccagctcggaagcccagaccgtgcagtccctcggcttcgccatctaccgcgcgctggactgggggctggacgagagcgaggagcgcgaactcagccctcagctggagcggctcatcgacctcatggccaacaacgacagcgaggacagcggctgcggtgccgccgatgagggctacgggggtcccgaggaggaggaggaggccgagggcgtcccccgcagcgtgcgcacctttgcccaggccatgcggctgtgcgcggcgcggctgaccgacccccggggcgcacaggcgcattaccaggccgtgtgccgcgcgctcttcgtggagacgctggagctgcgggccttcctggccagggtccgggaggccaaggagatgctgcagaagcttcgggaggacgagccgcatctggagacgcctcgggcagagctggacagcctgggtcacacagactgggcccgactgtgggttcagctcatgcgggagctccgccgcggagtgaagctgaagaaggtgcaagagcaggagttcaaccccctccccaccgagttccagctcacgcccttcgagatgctgatgcaggacatccgggcccggaactacaagctgcgcaaggtcatggtggatggggacatcccgccccgggtgaagaaggacgctcacgagctcatcctggactttatccgctcacggcctccactgaagcaggtctctgagaggcggctgcgcccgttgccaccaaagcaaaggtccctgcatgagaagatcctggaggagatcaagcaggagcggaggctgcgcccggtgcggggcgagggctgggctgcccgcgggtttggctctctgccctgcatcctcaacgcctgctccggagatgccaagtccacctcctgcatcaacctgtcagtcacagatgctgggggcagcgcccagcgcccgcggccccgcgtgctgctcaaggcgcctaccttggctgaaatggaagagatgaatacatctgaggaagaagagtctccgtgtggggaggtgacgctgaaacgggaccgctccttctcagagcatgacctggcccagctccgaagtgaggtggcctctggcctgcagtcggccacccaccccccaggagggacggagccaccacggccccgagctggcagtgcgcatgtgtggaggcccggctcccgagaccagggtacctgtcccgcgagtgtctctgaccccagccaccccctactcagcaaccggggctcctcgggggacagacccgaggcctccatgacccccgatgccaaacacctgtggctggagttcagccaccccgtggagagcctggcgctgactgtggaagaggtgatggacgtgcgccgtgtgctggtgaaggccgagatggaaaagtttttgcagaacaaggagctcttcagcagtctgaagaaggggaagatttgctgctgctgccgggccaagttcccgctgttctcgtggccgcccagctgtctcttctgcaagagagccgtctgcacttcctgtagcataaagatgaagatgccttctaagaaatttggacacatccctgtctacacactgggctttgagagtcctcagagggtatcagctgccaaaaccgcgccaatccagagaagagacatctttcagtctctgcaagggccacagtggcagagcgtggaggaggcgttcccccacatctactcccacggctgtgtcctgaaggatgtctgcagtgagtgcaccagctttgtggcagacgtggtgcgttccagccgcaagagcgtggacgtcctcaacactacgccacgacgcagtcgccagacccaatccctctacatccctaacaccaggactcttgacttcaagtga

SEQ ID NO: 760 - DNA, 407 bp, Homo Sapiens
tctgcctctgtggtgggcgtgctaagccctgtgtccccttaggcacccgagtgtacagccccccggagtggatccgctaccaccgctaccacgggcgctcggccaccgtgtggtcgctgggcgtgcttctctacgatatggtgtgtggggacatccccttcgagcaggacgaggagatcctccgaggccgcctgctcttccggaggagggtctctccagagtgccagcagctgatccggtggtgcctgtccctgcggccctcagagcggccgtcgctggatcagattgcggcccatccctggatgctgggggctgacgggggcgccccggagagctgtgacctgcggctgtgcaccctcgaccctgatgacgtggccagcaccacgtccagcagcgagagcttgtga

SEQ ID NO: 761 - DNA, 1047 bp, Homo Sapiens
atggcagagaaggtgctggtaacaggtggggctggctacattggcagccacacggtgctggagctgctggaggctggctacttgcctgtggtcatcgataacttccataatgccttccgtggagggggctccctgcctgagagcctgcggcgggtccaggagctgacaggccgctctgtggagtttgaggagatggacattttggaccagggagccctacagcgtctcttcaaaaagtacagctttatggcggtcatccactttgcggggctcaaggccgtgggcgagtcggtgcagaagcctctggattattacagagttaacctgaccgggaccatccagcttctggagatcatgaaggcccacggggtgaagaacctggtgttcagcagctcagccactgtgtacgggaacccccagtacctgccccttgatgaggcccaccccacgggtggttgtaccaacccttacggcaagtccaagttcttcatcgaggaaatgatccgggacctgtgccaggcagacaagacttggaacgcagtgctgctgcgctatttcaaccccacaggtgcccatgcctctggctgcattggtgaggatccccagggcatacccaacaacctcatgccttatgtctcccaggtggcgatcgggcgacgggaggccctgaatgtctttggcaatgactatgacacagaggatggcacaggtgtccgggattacatccatgtcgtggatctggccaagggccacattgcagccttaaggaagctgaaagaacagtgtggctgccggatctacaacctgggcacgggcacaggctattcagtgctgcagatggtccaggctatggagaaggcctctgggaagaagatcccgtacaaggtggtggcacggcgggaaggtgatgtggcagcctgttacgccaaccccagcctggcccaagaggagctggggtggacagcagccttagggctggacaggatgtgtgaggatctctggcgctggcagaagcagaatccttcaggctttggcacgcaagcctga

SEQ ID NO: 762 - DNA, 921 bp, Homo Sapiens
atggctctggtctttgagaagtgcgagctggcgacctgcactccccgggaacctggagtggctggcggagacgtctgctcctccgactccttcaacgaggacatcgcggtcttcgccaagcaggttcgcgccgaaaagccacttttttcctcaaatccagagctggacaatttgatgatacaagcaatacaagtactaaggtttcatcttttggagttagaaaaggtccacgaactgtgcgataacttctgccaccgatacattagctgtttgaaggggaaaatgcccatcgacctcgtcattgatgaaagagacggcagctccaagtcagatcatgaagaactttcaggctcctccacaaatctcgctgaccataacccttcttcttggcgagaccacgatgatgcaacctcaacccactcagcaggcaccccagggccctccagtgggggccatgcttcccagagcggagacaacagcagtgagcaaggggatggtttagacaacagtgtagcttcacctggtacaggtgacgatgatgatccggataaggacaaaaaacgccagaagaaaagaggcattttccccaaagtagcaacaaatatcatgagagcatggctcttccagcatctcacacatccgtacccttccgaagagcagaagaaacagttagcgcaagacacaggacttacaattctccaagtaaacaactggtttattaatgccagaagaagaatagtacagcccatgattgaccagtcaaatcgagcagtgagccaaggagcagcatatagtccagagggtcagcccatggggagctttgtgttggatggtcagcaacacatggggatccggcctgcaggacctatgagtggaatgggcatgaatatgggcatggatgggcaatggcactacatgtaa

SEQ ID NO: 763 - DNA, 1431 bp, Homo Sapiens
atgtcggggcccacctggctgcccccgaagcagccggagcccgccagagcccctcaggggagggcgatcccccgcggcaccccggggccaccaccggcccacggagcagcactccagccccaccccagggtcaatttttgcccccttccatctgagcagtgttaccaggccccagggggaccggaggatcgggggccggcgtgggtggggtcccatggagtactccagcacacgcaggggctccctgcagacagggggggccttcgccctggaagcctggacgccgagatagacttgctgagcagcacgctggccgagctgaatgggggtcggggtcatgcgtcacggcgaccagaccgacaggcatatgagcccccgccacctcctgcctaccgcacgggctccctgaagccaaatccagcctcgccgctcccagcgtctccctatgggggccccactccagcctcttacactaccgccagcaccccggctggcccagccttccccgtgcaagtgaaggtggcacagccagtgaggggctgcggcccacccaggcggggagcctctcaggcctctgggcccctcccgggcccccactttcctctcccaggccgaggtgaagtctgggggcctggctataggagccagagagagccagggccaggggccaaagaggaagctgctggggtctctggccctgcaggaagaggaagaggaggcgagcacgggccccaggtgcccctgagccagcctccagaggatgagctggataggctgacgaagaagctggttcacgacatgaaccacccgcccagcggggagtactttggccagtgtggtggctgcggagaagatgtggttggggatggggctggggttgtggcccttgatcgcgtctttcacgtgggctgctttgtatgttctacatgccgggcccagcttcgcggccagcatttctacgccgtggagaggagggcatattgcgagggctgctacgtggccaccctggagaaatgtgccacgtgctcccagcccatcctggaccggatcctgcgggctatggggaaggcctaccaccctggctgcttcacctgcgtggtgtgtcaccgcggcctcgacggcatccccttcacagtggatgctacgagccagatccactgcattgaggactttcacaggaagtttgccccaagatgctcagtgtgcggtggggccataatgcctgagccaggtcaggaggagactgtgagaattgttgctctggatcgaagttttcacattggctgttacaagtgcgaggagtgtgggctgctgctctcctctgagggcgagtgtcagggctgctacccgctggatgggcacatcttgtgcaaggcctgcagcgcctggcgcatccaggagctctcagccaccgtcaccactgactgctga

SEQ ID NO: 764 - DNA, 2121 bp, Homo Sapiens
atggccctgcccagcccacaggttctaatggggttgccagcgttgctgatgggcccggcgcagcatacttcttggccctgtggctcagctgtccccacattgaagagcatggtaacctttgaagatgtggctgtatacttctcccaagaggagtgggagctccttgatgcagcccagaggcacctgtaccacagtgtgatgctggaaaaccttgagcttgtgacctcacttggttcttggcatggagtagagggtgagggggcccatcccaagcagaatgtttctgtagaagtgttacaggtcaggatccctaatgcagatccttccaccaagaaagctaactcctgtgacatgtgtgggccattcttgaaagacattttgcacctggctgagcatcagggaacacagtctgaggagaaaccctacacatgtggagcatgtgggagagacttttggttgaatgcaaaccttcaccagcaccagaaggagcacagtggagggaagccctttagatggtacaaggacagggacgcacttatgaagagctctaaagtccacctgtcagagaaccccttcacttgcagggaaggtgggaaggtcatcctgggcagctgtgacctcctccagcttcaagctgttgacagtgggcagaagccatattccaatcttgggcagcttccagaagtctgtaccacacagaaactcttcgagtgcagcaactgtggaaaagccttcctgaagagctccactctccccaaccatctgagaactcactctgaagagataccatttacatgcccaacaggtggaaatttcttagaggagaaatcaatccttggtaataaaaagtttcacactggggaaataccccatgtgtgtaaggagtgtgggaaggcctttagtcactcatctaagctgaggaagcaccagaaatttcacactgaagtaaaatattatgagtgcattgcatgtgggaaaaccttcaaccacaaactcacatttgttcatcatcagagaattcactcaggagaaagaccttatgagtgtgatgaatgtgggaaagccttcagtaacagatcacacctcattcggcatgagaaagttcacactggagaaaggccttttgagtgcctgaaatgtggaagagccttcagccaaagctccaatttccttcggcatcagaaagttcacacacaggtaagaccttatgagtgcagtcaatgtggtaaatccttcagccgaagctctgctctcattcagcactggagagttcacactggagaaagaccgtatgaatgcagtgaatgtggaagagcttttaacaataactccaaccttgctcagcaccagaaagttcacaccggagaacggccttttgagtgcagtgaatgtggaagagacttcagccaaagctcccatctccttcgacatcagaaagttcacactggagaacggccttttgaatgctgtgattgtggtaaagccttcagtaatagctccaccctcatccagcaccagaaagtacatactgggcaaaggccttatgagtgcagcgaatgtaggaaatccttcagccgcagctccagcctgattcagcactggagaattcacactggagaaaagccttacgagtgtagtgagtgtgggaaagcctttgctcacagctccactctcattgaacactggagagttcacacaaaagaaaggccttatgagtgcaatgaatgtgggaaattctttagccaaaactccattctcattaagcatcagaaagttcatactggagaaaagccttataaatgcagtgaatgtgggaaattctttagccgaaaatccagccttatttgtcactggagagttcacactggagaaaggccttacgaatgcagtgaatgtgggagagcctttagcagtaactcccacctggttcgtcatcagagagttcacacacaagaaaggccctatgagtgcatccagtgtggaaaagcctttagtgaaagatctacacttgttcggcaccagaaagttcacaccagagaaaggacttatgagtgtagccagtgtgggaaactcttcagccatctttgtaaccttgcacagcataaaaagattcatacctga

SEQ ID NO: 765 - DNA, 3585 bp, Homo Sapiens
atgatgtgcgaggtgatgcccaccatcagcgaggatggccggcggggctcggcgctgggcccggacgaggcgggcggggagctggagcgcctcatggtcacgatgctcacggagcgcgagcgcctgctggagacgctgcgcgaggcacaggacgggttggctacagcgcagctgcggctgcgcgagctcggccacgagaaggactcgctgcagcgccagctcagcatcgcgctgccccaggagtttgcagctctgacgaaggagctgaacttatgtcgggagcagctgctggagagggaggaagagattgcagagctgaaggcggaacggaacaacacgcggctgctcctggaacacctggagtgcctggtgtccaggcacgagaggtcactgcgcatgaccgtggtgaagcgccaggcccagtccccgggtggggtctcctcggaggtagaagtgctcaaagctctaaagtctctcttcgagcaccacaaggccctggatgagaaggtccgggagcggctgcggatggcgctggagcgcgtggcagtgctcgaggaggagctggaactgagcaatcaggagactctgaaccttcgagaacagctgtctaggcggcggtcagggctggaagagccgggcaaggatggggatgggcagactcttgccaatggcctgggtcctggcggggattccaaccggcgcacagcagagctggaggaggccctggagcggcagcgcgccgaggtgtgccagctgcgggagcgcctggcggtgctgtgccgtcagatgagccagctggaggaggagttgggcaccgcgcaccgtgagctgggcaaggcagaggaagccaactccaagctgcagcgcgacctcaaggaggcgctggcgcagcgggaagatatggaggagcggattacaacactggagaagcgctacctgagcgcccagcgggaggccacgtctctgcacgacgccaacgacaaactggagaacgagttagctagcaaggagtcgttgtatcggcagagtgaagagaagagccgtcagctggccgagtggttggacgacgccaagcagaagctgcagcagacgctgcagaaagcggagaccttgcccgagatagaggcgcagctggcgcagcgcgtggcggcgctcaacaaggccgaggaacgtcatgggaattttgaggagcggcttcggcagctggaggcccagctggaagagaagaatcaagagctgcagcgggcccggcagcgggagaagatgaacgatgaccacaataagcggctgtccgagacggtggacaagctgctgagcgagtccaacgagcgcttacagcttcacctcaaggagcgcatgggggcgctggaggagaagaactccctgagcgaggagatagccaacatgaagaagcttcaggatgagttgctgctaaacaaggagcagctcttggccgaaatggagcggatgcagatggagatcgaccagctgcgggggaggccaccatcctcctactccaggtctctccctggcagtgccctggagctccgttactctcaggcacccactttaccttctggtgcccacctggatccctatgtggctggcagtggtcgggcaggcaagaggggccgctggtcaggggtcaaggaggagccctccaaggattgggagcggtctgcccctgcgggctccataccacccccattccctggggaactggacggctccgatgaggaggaggcagaggggatgtttggggccgagctgctgtcccccagtgggcaggctgacgtgcagacgctggccatcatgcttcaggagcagctggaggccatcaacaaggagatcaagctgatccaagaggagaaggagacaacagaacagagggcagaggagctggagagtcgggtgtccagctctggcttggactcgttgggccgctaccgcagcagctgctccctgcccccctccctcaccacctctacccttgccagcccctcccctcccagctctggccactcaacaccccgcctggcaccccctagccctgcccgtgagggcaccgacaaggctaatcatgtccctaaggaggaagctggagctccacgaggggaggggccggccatcccaggagacaccccaccacccactccccgctctgcccgtcttgagagaatgacccaggccttggcactgcaggcggggtccctggaagatgggggacccccacggggaagtgagggcaccccagattctctgcacaaagcccccaagaagaagagcatcaagtcatccataggccgtctctttggcaagaaagagaagggacgaatgggacccccaggccgggacagctcttctctggctggaacaccctcagatgagacactggccactgaccctctggggctagccaagctgacaggcccaggagacaaggaccgaaggaacaagaggaagcatgaactcctggaggaggcctgccgccagggcctaccttttgctgcctgggacgggcccaccgtggtgtcctggctggagctgtgggtgggcatgcctgcctggtatgtggccgcctgccgggccaatgtcaagagcggtgccatcatggccaacctgtcagacacggagatccagcgcgagatcggcatcagcaacccgctgcaccgactcaagctacgcctcgccatccaggagatggtctcgctcacctcgccctcagcccccgcctcctcccgcacttccacaggaaacgtgtggatgacacacgaggagatggagtcccttacggccacgaccaagcccgagaccaaggagatcagctgggagcagatcctggcatatggcgacatgaaccacgagtgggtggggaacgactggctgcccagcctggggctgccccaataccgcagctacttcatggagtcgctggtggacgctcgaatgttagatcaccttaacaagaaggagctccggggccaactcaagatggtggacagctttcacagggtgagtctacattatgggattatgtgcctgaaacggctcaactatgaccggaaggacctggagcggaggcgggaagaaagtcagacccagatccgagacgtgatggtgtggtccaatgagcgggtcatgggttgggtgtccgggctgggcctgaaggaatttgccacgaacctcacggagagcggggtacacggggcactgctcgccctggacgagaccttcgactactccgacctggccttgctcctgcagatccccacgcagaatgcacaggcccggcagcttctggagaaggaattcagcaaccttatctccttaggcacagacaggcggctggacgaggacagcgccaagtctttcagccgctccccatcctggcggaagatgttccgggagaaggacctccgaggcgtaactcccgactcagctgagatgttgccccccaactttcgttcggctgcagcgggagccctgggctctccggggctccctctccgcaagctgcagccagaaggccagacttctgggagttcccgggcagacggcgtttcggtccggacctattcctgctag

SEQ ID NO: 766 - DNA, 498 bp, Homo Sapiens
atggtgaatccgggcagcagctcgcagccgcccccggtgacggccggctccctctcctggaagcggtgcgcaggctgcgggggcaagattgcggaccgctttctgctctatgccatggacagctattggcacagccggtgcctcaagtgctcctgctgccaggcgcagctgggcgacatcggcacgtcctgttacaccaaaagtggcatgatcctttgcagaaatgactacattaggttatttggaaatagcggtgcttgcagcgcttgcggacagtcgattcctgcgagtgaactcgtcatgagggcgcaaggcaatgtgtatcatcttaagtgttttacatgctctacctgccggaatcgcctggtcccgggagatcggtttcactacatcaatggcagtttattttgtgaacatgatagacctacagctctcatcaatggccatttgaattcacttcagagcaatccactactgccagaccagaaggtctgctaa

SEQ ID NO: 767 - DNA, 2961 bp, Homo Sapiens
atgtctcggatcgaatccctcacgcgggcgcggatcgaccggagcagagagctggcgagcaagacccgggaaaaggagaagatgaaggaagccaaggatgcccgctataccaatgggcacctcttcaccaccatttcagtttcaggcatgaccatgtgctatgcctgtaacaagagcatcacagccaaggaagccctcatctgcccaacctgcaatgtgactatccacaaccgctgtaaagacaccctcgccaactgtaccaaggtcaagcagaagcaacagaaagcggccctgctgaagaacaacaccgccttgcagtccgtttctcttcgaagtaagacaaccatccgggagcggccaagctcggccatctacccctccgacagcttccggcagtccctcctgggctcccgccgtggccgctcctccttgtctttagccaagagtgtttctaccaccaacattgctggacatttcaatgatgagtctcccctggggctgcgccggatcctctcacagtccacagactccctcaacatgcggaaccgaaccctatccgtggaatccctcattgacgaagcagaggtaatctacagtgagctgatgagtgactttgagatggatgagaaggactttgcagctgactcttggagtcttgctgtggacagcagcttcctgcagcagcataaaaaggaggtgatgaagcagcaagatgtcatctatgagctaatccagacagagctgcaccatgtgaggacactgaagatcatgacccgcctcttccgcacggggatgctggaagagctacacttggagccaggagtggtccagggcctgttcccctgcgtggacgagctcagtgacatccatacacgcttcctcagccagctattagaacgccgacgccaggccctgtgccctggcagcacccggaactttgtcatccatcgcttgggtgatctgctcatcagccagttctcaggtcctagtgcggagcagatgtgtaagacctactcggagttctgcagccgccacagcaaggccttaaagctctataaggagctgtacgcccgagacaaacgcttccagcaattcatccggaaagtgacccgccccgccgtgctcaagcggcacggggtacaggagtgcatcctgctggtgactcagcgcatcaccaagtacccgttactcatcagccgcatcctgcagcattcccacgggatcgaggaggagcgccaggacctgaccacagcactggggctagtgaaggagctgctgtccaatgtggacgagggtatttatcagctggagaaaggggcccgtctgcaggagatctacaaccgcatggaccctcgggcccaaaccccagtgcctggcaagggcccctttggccgagaggaacttctgaggcgcaaactcatccacgatggctgcctgctctggaagacagcgacggggcgcttcaaagatgtgctagtgctgctgatgacagatgtactggtgtttctccaggaaaaggaccagaagtacatctttcctaccctggacaagccttcagtggtatcgctgcagaatctaatcgtacgagacattgccaaccaggagaaagggatgtttctgatcagcgcagccccacctgagatgtacgaggtgcacacagcatcccgggatgaccggagcacctggatccgggtcattcagcagagcgtgcgcacatgcccatccagggaggacttccccctgattgagacagaggatgaggcttacctgcggcgaattaagatggagttgcagcagaaggaccgggcactggtggagctgctgcgagagaaggtcgggctgtttgctgagatgacccatttccaggccgaagaggatggtggcagtgggatggccctgcccaccctgcccaggggccttttccgctctgagtcccttgagtcccctcgtggcgagcggctgctgcaggatgccatccgtgaggtggagggtctgaaagacctgctggtggggccaggagtggaactgctcttgacaccccgagagccagccctgcccttggaaccagacagcggtggtaacacgagtcctggggtcactgccaatggtgaggccagaaccttcaatggctccattgaactctgcagagctgactcagactctagccagagggatcgaaatggaaatcagctgagatcaccgcaagaggaggcgttacagcgattggtcaatctctatggacttctacatggcctacaggcagctgtggcccagcaggacactctgatggaagcccggttccctgagggccctgagcggcgggagaagctgtgccgagccaactctcgggatggggaggctggcagggctggggctgcccctgtggcccctgaaaagcaggccacggaactggcattactgcagcggcaacatgcgctgctgcaggaggagctacggcgctgccggcggctaggtgaagaacgggcaaccgaagctggcagcctggaggcccggctccgggagagtgagcaggcccgggcactgctggagcgtgaggccgaagaggctcgaaggcagctggccgccctgggccagaccgagccactcccagctgaggccccctgggcccgcagacctgtggatcctcggcggcgcagcctccccgcaggcgatgccctgtacttgagtttcaaccccccacagcccagccgaggcactgaccgcctggatctacctgtcactactcgctctgtccatcgaaactttgaggaccgagagaggcaggaactggggagccccgaagagcggctgcaagacagcagtgaccctgacactggcagcgaggaggaaggtagcagccgtctgtctccgccccacagtccacgagactttaccagaatgcaggacatcccggaggagacggagagccgcgacggggaggctgtagcctccgagagctaa

SEQ ID NO: 768 - DNA, 1332 bp, Homo Sapiens
atgcagcgccgggacgaccccgccgcgcgcatgagccggtcttcgggccgtagcggctccatggacccctccggtgcccacccctcggtgcgtcagacgccgtctcggcagccgccgctgcctcaccggtcccggggaggcggagggggatcccgcgggggcgcccgggcctcgcccgccacgcagccgccaccgctgctgccgccctcggccacgggtcccgacgcgacagtgggcgggccagcgccgaccccgctgctgcccccctcggccacagcctcggtcaagatggagccagagaacaagtacctgcccgaactcatggccgagaaggactcgctcgacccgtccttcactcacgccatgcagctgctgacggcagaaattgagaagattcagaaaggagactcaaaaaaggatgatgaggagaattacttggatttattttctcataagaacatgaaactgaaagagcgagtgctgatacctgtcaagcagtatcccaagttcaattttgtggggaagattcttggaccacaagggaatacaatcaaaagactgcaggaagagactggtgcaaagatctctgtattgggaaagggctcaatgagagacaaagccaaggaggaagagctgcgcaaaggtggagaccccaaatatgcccacttgaatatggatctgcatgtcttcattgaagtctttggacccccatgtgaggcttatgctcttatggcccatgccatggaggaagtcaagaaatttctagtaccggatatgatggatgatatctgtcaggagcaatttctagagctgtcctacttgaatggagtacctgaaccctctcgtggacgtggggtgccagtgagaggccggggagctgcacctcctccaccacctgttcccaggggccgtggtgttggaccacctcggggggctttggtacgtggtacaccagtaaggggagccatcaccagaggtgccactgtgactcgaggcgtgccacccccacctactgtgaggggtgctccagcaccaagagcacggacagcgggcatccagaggatacctttgcctccacctcctgcaccagaaacatatgaagaatatggatatgatgatacatacgcagaacaaagttacgaaggctacgaaggctattacagccagagtcaaggggactcagaatattatgactatggacatggggaggttcaagattcttatgaagcttatggccaggacgactggaatgggaccaggccgtcgctgaaggcccctcctgctaggccagtgaagggagcatacagagagcacccatatggacgttattaa

SEQ ID NO: 769 - DNA, 1080 bp, Homo Sapiens
atggctgaccaggaccctgcgggcatcagccccctccagcaaatggtggcctcaggcaccggggctgtggttacctctctcttcatgacacccctggacgtggtgaaggttcgcctgcagtctcagcggccctccatggccagcgagctgatgccttcctccagactgtggagcctctcctataccaaattgccctcctctctccaatccacagggaagtgcctcctgtattgcaatggtgtcctggagcctctgtacctgtgcccaaatggtgcccgctgtgccacctggtttcaagaccctacccgcttcactggcaccatggatgccttcgtgaagatcgtgaggcacgagggcaccaggaccctctggagcggcctccccgccaccctggtgatgactgtgccagctaccgccatctacttcactgcctatgaccaactgaaggccttcctgtgtggtcgagccctgacctctgacctctacgcacccatggtggctggcgcgctggcccgcctgggcaccgtgactgtgatcagccccctggagcttatgcggacaaagctgcaggctcagcatgtgtcgtaccgggagctgggtgcctgtgttcgaactgcagtggctcagggtggctggcgctcactgtggctgggctggggccccactgcccttcgagatgtgcccttctcagccctgtactggttcaactatgagctggtgaagagctggctcaatgggttcaggccgaaggaccagacttctgtgggcatgagctttgtggctggtggcatctcagggacggtggctgcagtgctgactctaccctttgacgtggtaaagacccaacgccaggtcgctctgggagcgatggaggctgtgagagtgaaccccctgcatgtggactccacctggctgctgctgcggaggatccgggccgagtcgggcaccaagggactctttgcaggcttccttcctcggatcatcaaggctgccccctcctgtgccatcatgatcagcacctatgagttcggcaaaagcttcttccagaggctgaaccaggaccggcttctgggcggctga

SEQ ID NO: 770 - DNA, 978 bp, Homo Sapiens
atgtccgcccaggcgcagatgcgggccctgctggaccagctcatgggcacggctcgggacggagacgaaaccagacagagggtcaagtttacagatgaccgtgtctgcaagagtcaccttctggactgctgcccccatgacatcctggctgggacgcgcatggatttaggagaatgtaccaaaatccacgacttggccctccgagcagattatgagattgcaagtaaagaaagagacctgttttttgaattagatgcaatggatcacttggagtcctttattgctgaatgtgatcggagaactgagctcgccaagaagcggctggcagaaacacaggaggaaatcagtgcggaagtttctgcaaaggcagaaaaagtacatgagttaaatgaagaaataggaaaactccttgctaaagccgaacagctaggggctgaaggtaatgtggatgaatcccagaagattcttatggaagtggaaaaagttcgtgcgaagaaaaaagaagctgaggaagaatacagaaattccatgcctgcatccagttttcagcagcaaaagctgcgtgtctgcgaggtctgttcagcctaccttggtctccatgacaatgaccgtcgcctggcagaccacttcggtggcaagttacacttggggttcattcagatccgagagaagcttgatcagttgaggaaaactgtcgctgaaaagcaggagaagagaaatcaggatcgcttgaggaggagagaggagagggaacgggaggagcgtctgagcaggaggtcgggatcaagaaccagagatcgcaggaggtcacgctcccgggatcggcgtcggaggcggtcaagatctacctcccgagagcgacggaaattgtcccggtcccggtcccgagatagacatcggcgccaccgcagccgttcccggagccacagccggggacatcgtcgggcttcccgggaccgaagtgcgaaatacaagtaa

SEQ ID NO: 771 - DNA, 318 bp, Homo Sapiens
atgtctatatatttccccattcactgccccgactatctgagatcggccaagatgactgaggtgatgatgaacacccagcccatggaggagatcggcctcagcccccgcaaggatggcctttcctaccagatcttcccagacccgtcagattttgaccgctgctgcaaactgaaggaccgtctgccctccatagtggtggaacccacagaaggggaggtggagagcggggagctccggtggccccctgaggagttcctggtccaggaggatgagcaagataactgcgaagagacagcgaaagaaaataaagagcagtag

SEQ ID NO: 772 - DNA, 3966 bp, Homo Sapiens
atgcagtgcctagcggccgcccttaaggacgaaaccaacatgagtgggggaggggagcaggccgacatcctgccggccaactacgtggtcaaggatcgctggaaggtgctgaaaaagatcgggggcgggggctttggtgagatctacgaggccatggacctgctgaccagggagaatgtggccctcaaggtggagtcagcccagcagcccaagcaggtcctcaagatggaggtggccgtgctcaagaagttgcaagggaaggaccatgtgtgcaggttcattggctgtggcaggaacgagaagtttaactatgtagtgatgcagctccagggccggaacctggccgacctgcgccgtagccagccgcgaggcaccttcacgctgagcaccacattgcggctgggcaagcagatcttggagtccatcgaggccatccactctgtgggcttcctgcaccgtgacatcaagccttcaaactttgccatgggcaggctgccctccacctacaggaagtgctatatgctggacttcgggctggcccggcagtacaccaacaccacgggggatgtgcggccccctcggaatgtggccgggtttcgaggaacggttcgctatgcctcagtcaatgcccacaagaaccgggagatgggccgccacgacgacctgtggtccctcttctacatgctggtggagtttgcagtgggccagctgccctggaggaagatcaaggacaaggaacaggtagggatgatcaaggagaagtatgagcaccggatgctgctgaagcacatgccgtcagagttccacctcttcctggaccacattgccagcctcgactacttcaccaagcccgactaccagttgatcatgtcagtgtttgagaacagcatgaaggagaggggcattgccgagaatgaggcctttgactgggagaaggcaggcaccgatgccctcctgtccacgagcacctctaccccgccccagcagaacacccggcagacggcagccatgtttggggtggtcaatgtgacgccagtgcctggggacctgctccgggagaacaccgaggatgtgctacagggagagcacctgagtgaccaggagaatgcacccccaattctgcccgggaggccctctgaggggctgggccccagtccccaccttgtcccccaccccgggggtcctgaggctgaagtctgggaggagacagatgtcaaccggaacaaactccggatcaacatcggcaaaagcccctgtgtggaggaggaacagagccgaggcatgggggtccccagctccccagtgcgtgcccccccagactcccccacaaccccagtccgttctctgcgctaccggagggtgaacagccctgagtcagaaaggctgtccacggcggacgggcgagtggagctacctgagaggaggtcacggatggatctgcctggctcgccctcgcgccaggcctgctcctctcagccagcccagatgctgtcagtggacacaggccacgctgaccgacaggccagtggccgcatggacgtgtcagcctctgtggagcaggaggccctgagcaacgccttccgctcggtgccgctggctgaggaggaggatttcgacagcaaagagtgggtcatcatcgacaaggagacggagctcaaggacttccctccaggggctgagcccagcacatcgggcaccacggatgaggagcccgaggagctgcggccactgcccgaggagggcgaagagcggcggcggctgggggcagagcccaccgtccggccccggggacgcagcatgcaggcgctggcggaggaggacctgcagcatttgccgccccagcccctgccaccccagctgagccagggcgatggccgttccgagacgtcacagccccccacgcctggcagcccttcccactcacccctgcactcgggaccccgccctcgacggagagagtcggaccccacaggcccacagagacaggtgttctccgtggcgcccccatttgaggtgaatggcctcccacgagctgtgcctctgagtctgccctaccaggacttcaaaagagacctctccgattaccgagaacgggcgcggttgctcaacagggtccggagggtgggcttctcgcacatgctgctcaccaccccccaggtcccactggctcctgttcagcctcaggctaatgggaaggaggaagaggaggaggaggaggaagatgaggaagaggaagaagaggatgaggaagaagaagaggaggaagaggaagaggaggaggaagaagaggaggaggaggaagaggaggaggaggctgcagcggcagttgccttgggggaggtgctggggcctcgtagtggctccagcagtgaggggagtgagaggagcactgaccggagccaggagggtgccccgtccacgctgctggcagacgatcagaaggagtccaggggccgggcctccatggccgatggggacctggagcctgaggagggctccaaaacgctggtgcttgtctctcctggcgacatgaagaagtcgcccgtcactgccgaactggcccccgaccccgacctgggcaccctggctgccctcactcctcagcatgagcggccccagcccacgggcagccagctggacgtatctgagccaggcaccctgtcctctgtcctcaagtctgagcccaagcccccggggcctggggcagggctgggggccgggacagtgaccacaggggtcgggggcgtggcagtcacctcctcacccttcaccaaagttgagaggacctttgtgcacattgcggagaaaacccacctcaacgtcatgtcttccggtggacaagccttgcggtctgaggagttcagcgctgggggcgagctgggtctggagctggcctctgatgggggcgctgtggaggagggggcccgagcgcccctggagaacggcctcgccctgtcagggctgaatggggctgagatagagggctctgccctgtctggggccccccgggaaaccccctcagagatggccacaaactcactgcccaatggcccggcccttgcagacgggccagccccggtgtccccgctggagccaagccctgagaaagtggccaccatctcccccagacgccatgctatgccaggctctcgccccaggagccgtatccctgtcctgctctctgaggaggacacgggctcggagccctcaggctcactgtcggccaaagagcggtggagcaagcgggctcggccgcagcaggacctggcgcggctggtgatggagaagaggcagggccgcctgctgttgcggctggcctcaggggcctcgtcctcctccagtgaggagcagcgccgtgcctctgagaccctctcaggcacgggctctgaggaggacacgcccgcctctgagccggcagcggccttgcccaggaagagcgggagggcagccgccaccaggagccggattccccgccccattggcctccgcatgcccatgcctgttgcagcccagcagcccgccagcagatcccatggcgcggccccagcattggacacagccatcaccagcaggctccagctgcagacgcccccagggtcggccactgctgctgacctccgccccaaacaacctcctggccgcggcctgggcccagggcgagcccaagccggagccaggcccccagcgccgcgcagcccgcgcctccccgcgtccacatccgccgcgcgcaatgccagcgcgtccccccggagccagtccctgtcccgcagagagagcccctccccctcgcaccaggcccggcccggggtccccccgccccggggcgtcccgccggcccgggcccagcctgatggcaccccctcccccgggggctccaagaaaggacccagagggaaactccaggctcagcgcgcaacaaccaaaggccgggcaggaggcgcggagggccgggctggggccagataa

SEQ ID NO: 773 - DNA, 1434 bp, Homo Sapiens
atggcgacgtacacctgcataacttgccgggtggcgttccgcgacgcggacatgcagcgggcccactataagacggactggcaccgctacaacctgcggcggaaggtggccagcatggccccagtgaccgccgagggcttccaggagcgagtgcgggcgcagcgggccgtcgcggaggaggagagcaagggctcggccacctactgcaccgtttgcagtaagaagtttgcctctttcaacgcctacgagaaccacctcaagtcccggcgtcacgttgagctggagaagaaggccgtgcaggcagtgaatcggaaagtggagatgatgaatgaaaagaacttggagaaaggactgggcgtggacagtgtggacaaggatgccatgaacgcggccatccagcaggccatcaaggcccagccgtccatgtctcccaagaaggcgcccccagcgcctgcaaaggaggccaggaatgtcgtggccgtgggtactggtggccgtgggacccacgaccgagacccgagtgagaaaccaccccggctccagtggtttgaacagcaggcgaagaagttggcaaagcagcaggaggaggacagcgaggaggaggaagaggacctggatggagacgattgggaagatattgattctgatgaagaattggaatgtgaggatactgaagcaatggacgatgtggtggagcaggatgcagaggaggaagaggctgaggaaggcccaccccttggtgccatccctatcacggactgcttattttgttcccatcattccagctcgctgatgaagaatgtggctcacatgaccaaagaccacagtttctttattcctgatatagaatatctttcagatattaagggactgattaaatacttgggagagaaagttggtgttggcaagatttgcttgtggtgcaacgagaaagggaagtccttctactccacagaagctgtacaggcacatatgaatgacaaaagccactgtaagctcttcacagatggcgatgctgctttggaatttgcagacttctatgattttaggagtagctatccagatcacaaggaaggggaggaccccaataaggctgaggagttgccctcagaaaagaacttggaatatgatgatgaaaccatggaattgattctgccttctggtgccagagtgggtcatcgctccttgatgagatactacaaacagcgatttggcttgtcaagagctgtggcagttgccaaaaatcggaaggccgtgggccgagtacttcagcagtacagagccctgggatggactggcagcacaggagcggctcttatgcgagagcgagacatgcagtatgtccaaaggatgaaatcaaaatggatgctgaagacaggaatgaagaacaatgccaccaagcagatgcactttcgggtccaagtgagattctga

SEQ ID NO: 774 - DNA, 2466 bp, Homo Sapiens
atggacccagaatgcgcccagctgctcccggctctctgtgctgttctggtagatcccaggcagccggtggcagatgacacctgtttggagaagctcctggactggtttaaaacggtcactgaaggagagtccagtgtcgtgctgctgcaggagcacccctgcctggtggagctgctgtcccatgtgctgaaagtccaggacctgagttctggggtcctctccttctcactgcgcctggcaggaaccttcgcagcccaggaaaactgcttccagtatcttcagcagggggagttactaccagggctctttggggagccaggacccctcggccgagcaacctgggccgtccccaccgtgcgcagcggctggatccagggcctgcgctccctggcacagcaccccagcgccctgcgcttcctggccgaccatggtgcggtcgacaccatcttctccctgcagggagactccagcctgtttgtggcctcggcggccagtcagctcctggtgcacgtcctggctttgtccatgcgaggtggagccgaggggcagccctgcctgccggggggtgactggcccgcgtgtgcccagaagatcatggatcacgttgaagagtccttgtgctccgcggccacccccaaggtcactcaggccctgaacgtcctgaccacgaccttcgggcgctgccagagcccctggacggaagccctgtgggtgcggctgagtccccgcgtggcctgtctgctggagagagaccccatccccgccgcacactcgttcgtggacctgcttctctgtgtggctcgttctcccgtgttcagttcttccgacggcagcctgtgggagacagtggcgcgggctctgagctgcctgggtcccacccacatgggacccctggctttggggatcctgaagctcgagcactgtccacaggcactgaggacccaggccttccaggtccttctccagcccctggcctgtgtcctgaaggccacggttcaggcccccggacccccaggcttgctggacgggacggcagacgatgccacgacggtggacacactcctggcctccaagtcgtcctgcgccggcctcctgtgccgcaccctggctcacctggaggagctgcagccgctgccccagcgcccttcaccgtggccccaggcgtctctactgggggctacagtgactgtcctgcggctctgtgacggctcggctgcccctgcctccagtgtggggggccacctctgtgggaccctggcgggctgcgtccgggtccagcgagcagccctcgacttcctggggacgctgtcacaggggacaggcccccaggagctggtgacgcaggcgcttgctgtcctcctggagtgcctcgagagccccggctccagccccacggttctgaagaaggccttccaggccacgctcaggtggctcctgagctcacccaagacccccggctgctctgatctcggccccctcatcccgcagttcctcagagagctgttccctgtgctgcagaaacgcctgtgccacccctgctgggaggtgagggactccgccctcgagttcctgacccagctgagcaggcactggggaggacaggctgacttcagatgcgcactcttggcttcagaggtgcctcagctggccctgcagctcctccaggaccctgagagttatgtccgagcgagtgcagtgaccgccatggggcagctgtccagccagggcctgcacgcccccaccagccctgagcatgcagaggcccggcagagcctgttcctggagctcctgcacatcctctccgtagactcggagggcttcccacggcgggcggtcatgcaagtcttcactgagtggctgcgggacggccacgccgacgcggcccaggacacggagcagttcgtggccactgtgctgcaggcggcgagccgagacctggactgggaggtccgcgcccagggcctggagctggccctcgtgttcctgggccagactttggggccgccgcgtacccactgcccctatgccgtggccctacccgaggtggccccagcccagccactcaccgaggcactgagggctctctgccacgtggggctctttgacttcgccttttgtgccttgtttgactgcgaccgccctgtggcgcagaagtcttgtgacctccttctcttcctgagggacaagattgcttcctacagcagcctgcgggaggccaggggcagccccaacactgcctccgcagaggccaccctgccgaggtggcgggcgggtgagcaggcccagcccccaggggaccaggagcctgaggctgtgctggccatgctcaggtccctagacctggagggcctgcggagcacgctggccgagagcagcgaccacgtggaaaagagtccccagtccctcctgcaggacatgctggccacgggaggcttcctgcagggggacgaggccgactgctactga

SEQ ID NO: 775 - DNA, 1593 bp, Homo Sapiens
atggctgcgctgcgaaggctcttgtggccgccaccccgggtgtctcctccactctgcgctcaccagcccctccttgggccgtgggggcggcctgcggtgaccaccctgggccttcctggccggcccttctcctcccgagaggatgaggagagggctgtggcggaggcggcatggaggcggcggcggcgctggggggagctgagcgtggcggcggcggccggcggggggctggtcggcctggtatgctaccagctgtacggggaccccagggccggctcgccggcgaccgggcgaccctcaaagagcgcggccacggagcccgaggacccgccccgcggccgggggatgctgcccatcccagtggcggctgccaaggagacggttgctattggcagaacagacattgaagacttagacctttatgccacatctcgggagaggcgatttcgtttatttgcttctatagaatgtgaagggcagttattcatgactccgtatgattttattttggctgttacaacagatgagcccaaagttgccaaaacttggaagtcactttccaaacaggaattaaatcaaatgctcgcagaaacaccaccagtttggaaaggctcatcgaagctatttcgaaatcttaaagaaaaaggtgtgatttcttacacagaatatctttttcttttatgtattttaacaaagccacatgcagggttcagaatagctttcaacatgtttgacactgatggcaatgagatggtggataaaaaagagtttttggtgcttcaagagatattcaggaaaaaaaatgaaaagagagaaattaaaggagatgaagaaaagcgtgcaatgctgcgtcttcaactttatggataccattctcctactaatagtgtacttaaaacagatgctgaggaacttgtctccagaagctattgggatacactgagacgtaacacaagccaagcactgttttcagacctcgcagagcgtgctgatgacatcacaagtttagtaacagatactacacttcttgtacacttttttggaaagaaaggaaaagctgagctcaactttgaagatttttatagattcatggataatctccaaacagaagttctagaaatagaattcctttcctactcaaatggaatgaataccatcagtgaagaagattttgctcatattcttttacgatatacaaatgtggaaaatacatcagtatttttagaaaatgtgcgttacagtatacctgaagaaaagggcatcacatttgatgaattcaggtcatttttccagtttttaaacaacctagaagactttgcaatagccctgaatatgtataactttgcaagtcgttctatagggcaagatgaatttaaacgtgccgtctatgtagctactggactcaaattttcaccacatttagtgaacactgtcttcaagatttttgatgttgacaaagatgatcaattaagttataaagaatttattggaattatgaaagacagactccatagaggattccggggttataaaacagtccagaagtaccccactttcaaatcctgcctgaagaaagaacttcacagcagataa

SEQ ID NO: 776 - DNA, 1566 bp, Homo Sapiens
atgctgccccgtcggcctctggcgtggcccgcgtggctgttgcggggtgctccgggagccgcgggttcttggggtcggccggttggccccctggcccgcagaggctgctgctccgccccggggacccccgaggtgccgctgacccgggagcgctaccccgtgcggcgcttgccgttctccacggtgtctaagcaggacctggccgcctttgagcgcatcgtgcccggcggggtcgtcacggacccggaagcgctgcaggctcccaacgtggactggttgcggacgctgcgaggctgtagcaaggtgctgctgaggccacggacgtcggaggaggtgtcccacatcctcaggcactgccacgagaggaacctggccgtgaacccacaggggggcaacacaggcatggtgggtggcagcgtccccgtctttgacgagatcatcctctccactgcccgcatgaaccgggtcctcagcttccacagcgtgtctggaattctggtttgccaggcgggctgcgtcctggaggagctgagccggtatgtggaggaacgggacttcatcatgccgctggacttaggagccaagggcagctgccacatcgggggaaacgtggcaaccaacgctggaggcctgcggtttcttcgatatggctcactgcatgggactgtcctgggcctggaagtggtgctggccgacggcactgtcctggactgcctgacctccctgaggaaggacaacacgggctatgacctgaagcagctgttcatcgggtcggagggcactttggggatcatcaccacggtgtccatcttgtgtccacccaagcccagggctgtgaacgtggctttcctcggctgcccaggctttgctgaggttctgcagaccttcagcacctgcaaggggatgctgggtgagatcctgtctgcattcgagttcatggatgctgtgtgcatgcagctggtcgggcgccatctccacctggccagcccggtgcaagagagtccgttttacgtcctcatcgagacttcaggctccaacgcaggccatgacgctgagaagctgggccacttcctggagcacgcgctgggctccggcctggtgaccgatgggaccatggccaccgaccagaggaaagtcaagatgctgtgggccctgagggaaaggatcacagaggcgctgagccgggatggctacgtgtacaagtacgacctctccctccctgtggagcggctctacgacatcgtgactgacctgcgcgcccgcctcggcccgcacgccaagcacgtggtgggctatggccaccttggagatggtaacctgcacctcaatgtgacggcggaggccttcagcccctcgctcctggctgccctggagccccacgtgtacgagtggacggccgggcagcagggcagcgtcagcgcggagcacggagtgggcttcaggaagagggacgtcctgggctacagcaagccaccgggggccctgcagctcatgcagcagctcaaggccctgctggaccccaagggcatcctcaacccctacaagacgctgcccagccaggcctga

SEQ ID NO: 777 - DNA, 2907 bp, Homo Sapiens
atggactctactctaacagcaagtgaaatccggcagcgatttatagatttcttcaagaggaacgagcatacgtatgttcactcgtctgccaccatcccattggatgaccccactttgctctttgccaatgcaggcatgaaccagtttaaacccattttcctgaacacaattgacccatctcaccccatggcaaagctgagcagagctgccaatacccagaagtgcatccgggctgggggcaaacataatgacctggacgatgtgggcaaggatgtctatcatcacaccttcttcgagatgctgggctcttggtcttttggagattactttaaggaattggcatgtaagatggctctggaactcctcacccaagagtttggcattcccattgaaagactttatgttacttactttggcggggatgaagcagctggcttagaagcagatctggaatgcaaacagatctggcaaaatttggggctggatgacaccaaaatcctcccaggcaacatgaaggataacttctgggagatgggtgacacgggcccctgtggtccttgcagtgagatccactacgaccggattggtggtcgggacgccgcacatcttgtcaaccaggacgaccctaatgtgctggagatctggaaccttgtgttcatccagtataacagggaagctgatggcattctgaaacctcttcccaagaaaagcattgacacagggatgggcctggaacgactggtatctgtgctgcagaataagatgtccaactatgacactgacctttttgtcccttactttgaagccattcagaagggcacaggtgcccgaccatacactgggaaagttggtgctgaggatgccgatgggattgacatggcctaccgggtgctggctgaccacgctcggaccatcactgtggcactggctgatggtggccggcctgacaacacagggcgtggatatgtgttgagacggattctccgccgagctgtccgatacgcccatgaaaagctcaatgccagcaggggcttctttgctacgttagtggatgttgtcgtccagtccctgggagatgcatttcctgagctgaagaaggacccagacatggtgaaggacatcattaatgaagaagaggtgcagtttctcaagactctcagcagagggcgtcgcatcctggacaggaaaattcagagcctgggagacagcaagaccattcccggagacactgcttggctcctctatgacacctatgggtttccagtggatctgactggactgattgctgaagagaagggcctggtggtagacatggatggctttgaagaggagaggaaactggcccagctgaaatcacagggcaagggagctggtggggaagacctcattatgctggacatttacgctatcgaagagctccgggcacggggtctggaggtcacagatgattccccaaagtacaattaccatttggactccagtggtagctatgtatttgagaacacagtggctacggtgatggctctgcgcagggagaagatgttcgtggaagaggtgtccacaggccaggagtgtggagtggtgctggacaagacctgtttctatgctgagcaaggaggccagatctatgacgaaggctacctggtgaaggtggatgacagcagtgaagataaaacagagtttacagtgaagaatgctcaggtccgaggagggtatgtgctacacattggaaccatctacggtgacctgaaagtgggggatcaggtctggctgtttattgatgagccccgacgaagacccatcatgagcaaccacacagctacgcacattctgaacttcgccctgcgctcagtgcttggggaagctgaccagaaaggctcattggttgctcctgaccgcctcagatttgactttactgccaagggagccatgtccacccaacagatcaagaaggctgaagagattgctaatgagatgattgaggcagccaaggccgtctatacccaggattgccccctggcagcagcgaaagccatccagggcctacgggctgtgtttgatgagacctatcctgaccctgtgcgagtcgtctccattggggtcccggtgtccgagttgctggatgacccctctgggcctgctggctccctgacttctgttgagttctgtgggggaacgcacctgcggaactcgagtcatgcaggagcttttgtgatcgtgacggaagaagccattgccaagggtatccggaggattgtggctgtcacaggtgccgaggcccagaaggccctcaggaaagcagagagcttgaagaaatgtctctctgtcatggaagccaaagtgaaggctcagactgctccaaacaaggatgtgcagagggagatcgctgaccttggagaggccctggccactgcagtcatcccccagtggcagaaggatgaattgcgggagactctcaaatccctaaagaaggtcatggatgacttggaccgagccagcaaagccgatgtccagaaacgagtgttagagaagacgaagcagttcatcgacagcaaccccaaccagcctcttgtcatcctggagatggagagcggcgcctcagccaaggccctgaatgaagccttgaagctcttcaagatgcactcccctcagacttctgccatgctcttcacggtggacaatgaggctggcaagatcacgtgcctgtgtcaagttccccagaatgcagccaatcggggcttaaaagccagcgagtgggtgcagcaggtgtcaggcttgatggacggtaaaggtggtggcaaggatgtgtctgcacaggccacaggcaagaacgttggctgcctgcaggaggcgctgcagctggccacttccttcgcccagctgcgcctcggggatgtaaagaactga

SEQ ID NO: 778 - DNA, 1224 bp, Homo Sapiens
atgtctggtggctccgcggattataacagagaacatggcggcccagagggaatggaccccgatggtgtcatcgagagcaactggaatgagattgttgataactttgatgatatgaatttaaaggagtctctccttcgtggcatctatgcttacggttttgagaagccttccgctattcagcagagagctattattccctgtattaaagggtatgatgtgattgctcaagctcagtcaggtactggcaagacagccacatttgctatttccatcctgcaacagttggagattgagttcaaggagacccaagcactagtattggcccccaccagagaactggctcaacagatccaaaaggtaattctggcacttggagactatatgggagccacttgtcatgcctgcattggtggaacaaatgttcgaaatgaaatgcaaaaactgcaggctgaagcaccacatattgttgttggtacacccgggagagtgtttgatatgttaaacagaagatacctttctccaaaatggatcaaaatgtttgttttggatgaagcagatgaaatgttgagccgtggttttaaggatcaaatctatgagattttccaaaaactaaacacaagtattcaggttgtgttgctttctgccacaatgccaactgatgtgttggaagtgaccaaaaaattcatgagagatccaattcgaattctggtgaaaaaggaagaattgacccttgaaggaatcaaacagttttatattaatgttgagagagaggaatggaagttggatacactttgtgacttgtacgagacactgaccattacacaggctgttatttttctcaatacgaggcgcaaggtggactggctgactgagaagatgcatgccagagacttcacagtttctgctctgcatggtgacatggaccagaaggagagagatgttatcatgagggaattccggtcagggtcaagtcgtgttctgatcactactgacttgttggctcgcgggattgatgtgcaacaagtgtctttggttataaattatgatctacctaccaatcgtgaaaactatattcacagaattggcagagggggtcgatttgggaggaaaggtgtggctataaactttgttactgaagaagacaagaggattcttcgtgacattgagactttctacaatactacagtggaggagatgcccatgaatgtggctgaccttatttaa

SEQ ID NO: 779 - DNA, 2292 bp, Homo Sapiens
atggtggcctgccgggcgattggcatcctcagccgcttttctgccttcaggatcctccgctcccgaggttatatatgccgcaattttacagggtcttctgctttgctgaccagaacccatattaactatggagtcaaaggggatgtggcagttgttcgaattaactctcccaattcaaaggtaaatacactgagtaaagagctacattcagagttctcagaagttatgaatgaaatctgggctagtgatcaaatcagaagtgccgtccttatctcatcaaagccaggctgctttattgcaggtgctgatatcaacatgttagccgcttgcaagacccttcaagaagtaacacagctatcacaagaagcacagagaatagttgagaaacttgaaaagtccacaaagcctattgtggctgccatcaatggatcctgcctgggaggaggacttgaggttgccatttcatgccaatacagaatagcaacaaaagacagaaaaacagtattaggtacccctgaagttttgctgggggccttaccaggagcaggaggcacacaaaggctgcccaaaatggtgggtgtgcctgctgctttggacatgatgctgactggtagaagcattcgtgcagacagggcaaagaaaatgggactggttgaccaactggtggaacccctgggaccaggactaaaacctccagaggaacggacaatagaatacctagaagaagttgcaattacttttgccaaaggactagctgataagaagatctctccaaagagagacaagggattggtggaaaaattgacagcgtatgccatgactattccatttgtcaggcaacaggtttacaaaaaagtggaagaaaaagtgcgaaagcagactaaaggcctttatcctgcacctctgaaaataattgatgtggtaaagactggaattgagcaagggagtgatgccggttatctctgtgaatctcagaaatttggagagcttgtaatgaccaaagaatcaaaggccttgatgggactctaccatggtcaggtcctgtgcaagaagaataaatttggagctccacagaaggatgttaagcatctggctattcttggtgcagggctgatgggagcaggcatcgcccaagtctccgtggataaggggctaaagactatacttaaagatgccaccctcactgcgctagaccgaggacagcaacaagtgttcaaaggattgaatgacaaagtgaagaagaaagctctaacatcatttgaaagggattccatcttcagcaacttgactgggcagcttgattaccaaggttttgaaaaggccgacatggtgattgaagctgtgtttgaggaccttagtcttaagcacagagtgctaaaggaagtagaagcggtgattccagatcactgtatctttgccagtaacacatctgctctcccaatcagtgaaatcgctgctgtcagcaaaagacctgagaaggtgattggcatgcactacttctctcccgtggacaagatgcagctgctggagattatcacgaccgagaaaacttccaaagacaccagtgcttcagctgtagcagttggtctcaagcaggggaaggtcatcattgtggttaaggatggacctggcttctatactaccaggtgtcttgcgcccatgatgtctgaagtcatccgaatcctccaggaaggagttgacccgaagaagctggattccctgaccacaagctttggctttcctgtgggtgccgccacactggtggatgaagttggtgtggatgtagcgaaacatgtggcggaagatctgggcaaagtctttggggagcggtttggaggtggaaacccagaactgctgacacagatggtgtccaagggcttcctaggtcgtaaatctgggaagggcttttacatctatcaggagggtgtgaagaggaaggatttgaattctgacatggatagtattttagcgagtctgaagctgcctcctaagtctgaagtctcatcagacgaagacatccagttccgcctggtgacaagatttgtgaatgaggcagtcatgtgcctgcaagaggggatcttggccacacctgcagagggagacatcggagccgtctttgggcttggcttcccgccttgtctgggagggcctttccgctttgtggatctgtatggcgcccagaagatagtggaccggctcaagaaatatgaagctgcctatggaaaacagttcaccccatgccagctgctagctgaccatgctaacagccctaacaagaagttctaccagtga

SEQ ID NO: 780 - DNA, 1530 bp, Homo Sapiens
atggcagagcgtgcggcgctggaggagctggtgaaacttcagggagagcgcgtgcgaggcctcaagcagcagaaggccagcgccgagctgatcgaggaggaggtggcgaaactcctgaaactgaaggcacagctgggtcctgatgaaagcaaacagaaatttgtgctcaaaacccccaagggcacaagagactatagtccccggcagatggcagttcgcgagaaggtgtttgacgtaatcatccgttgcttcaagcgccacggtgcagaagtcattgatacacctgtatttgaactaaaggaaacactgatgggaaagtatggggaagactccaagcttatctatgacctgaaggaccagggcggggagctcctgtcccttcgctatgacctcactgttccttttgctcggtatttggcaatgaataaactgaccaacattaaacgctaccacatagcaaaggtatatcggcgggataacccagccatgacccgtggccgataccgggaattctaccagtgtgattttgacattgctgggaactttgatcccatgatccctgatgcagagtgcctgaagatcatgtgcgagatcctgagttcacttcagataggcgacttcctggtcaaggtaaacgatcgacgcattctagatgggatgtttgctatctgtggtgtttctgacagcaagttccgtaccatctgctcctcagtagacaagctggacaaggtgtcctgggaagaggtgaagaatgagatggtgggagagaagggccttgcacctgaggtggctgaccgcattggggactatgtccagcaacatggtggggtatccctggtggaacagctgctccaggatcctaaactatcccaaaacaagcaggccttggagggcctgggagacctgaagttgctctttgagtacctgaccctatttggcattgatgacaaaatctcctttgacctgagccttgctcgagggctggattactacactggggtgatctatgaggcagtgctgctacagaccccagcccaggcaggggaagagcccctgggtgtgggcagtgtggctgctggaggacgctatgatgggctagtgggcatgttcgaccccaaagggcgcaaggtgccatgtgtggggctcagcattggggtggagcggattttctccatcgtggaacagagactagaggctttggaggagaagatacggaccacggagacacaggtgcttgtggcatctgcacagaagaagctgctagaggaaagactaaagcttgtctcagaactgtgggatgctgggatcaaggctgagctgctgtacaagaagaacccaaagctactgaaccagttacagtactgtgaggaggcaggcatcccactggtggctatcatcggcgagcaggaactcaaggatggggtcatcaagctccgttcagtgacgagcagggaagaggtggatgtccgaagagaagaccttgtggaggaaatcaaaaggagaacaggccagcccctctgcatctgctga

SEQ ID NO: 781 - DNA, 471 bp, Homo Sapiens
atggcgccgaaagcgaagaaggaagctcctgcccctcctaaagctgaagccaaagcgaaggctttaaaggccaagaaggcagtgttgaaaggtgtccacagccacaaaaagaagaagatccgcacgtcacccaccttccggcggccgaagacactgcgactccggagacagcccaaatatcctcggaagagcgctcccaggagaaacaagcttgaccactatgctatcatcaagtttccgctgaccactgagtctgccatgaagaagatagaagacaacaacacacttgtgttcattgtggatgttaaagccaacaagcaccagattaaacaggctgtgaagaagctgtatgacattgatgtggccaaggtcaacaccctgattcggcctgatggagagaagaaggcatatgttcgactggctcctgattacgatgctttggatgttgccaacaaaattgggatcatctaa

SEQ ID NO: 782 - DNA, 423 bp, Homo Sapiens
atgtcgaagcgaggacgtggtgggtcctctggtgcgaaattccggatttccttgggtcttccggtaggagctgtaatcaattgtgctgacaacacaggagccaaaaacctgtatatcatctccgtgaaggggatcaagggacggctgaacagacttcccgctgctggtgtgggtgacatggtgatggccacagtcaagaaaggcaaaccagagctcagaaaaaaggtacatccagcagtggtcattcgacaacgaaagtcataccgtagaaaagatggcgtgtttctttattttgaagataatgcaggagtcatagtgaacaataaaggcgagatgaaaggttctgccattacaggaccagtagcaaaggagtgtgcagacttgtggccccggattgcatccaatgctggcagcattgcatga

SEQ ID NO: 783 - DNA, 2817 bp, Homo Sapiens
atgaactggaataaaggtggtcctggcactaagcgaggatttggctttggaggttttgccatcagtgctgggaaaaaggaggaacccaaactcccacagcagtcccacagtgcctttggggcaaccagctcttcttctggatttggaaagtcagctccaccacagcttccttctttctacaaaattggatctaagcgggccaactttgatgaagaaaatgcctattttgaagatgaggaagaagattctagcaacgttgatttaccttacattcctgctgaaaactcaccaactcgccagcaattccattccaagccagtagattctgacagcgatgatgatcccttggaggcattcatggctgaagtggaggatcaggcagctagagacatgaagaggcttgaagaaaaggacaaggaaagaaaaaacgtaaagggtattcgagatgacattgaagaggaagatgaccaagaagcttattttcgatacatggcagaaaacccaactgctggtgtggttcaggaggaagaggaagacaatctagaatatgatagtgacggaaatccaattgcacctaccaaaaaaatcattgatcctcttccccccattgatcattcagagattgactatccaccatttgaaaaaaacttttacaatgagcatgaagagataaccaacctcactccacagcagttaatagatctccggcataagctcaatcttcgggtctctggtgctgcacctcctagaccaggaagtagctttgctcattttgggtttgacgaacaacttatgcaccagattcggaaatctgaatacacacagcccactccaatacagtgccagggtgtgcctgtggcattaagtggtagagacatgattggtattgccaaaacaggtagtgggaaaactgcagccttcatttggcccatgttgattcatataatggaccagaaggagttggaaccaggtgatggaccaattgcagtgattgtgtgtcctaccagggagctttgccagcagatccatgcagaatgtaagcggtttggaaaagcatataatcttcgatcagtggccgtatatggaggagggagtatgtgggagcaggccaaggcccttcaggagggggcagagattgttgtgtgtaccccaggtcgactgatagatcatgtgaaaaagaaagctaccaatcttcaaagagtctcttaccttgtgtttgatgaagcagatcgaatgtttgacatgggatttgagtaccaagttcgatccatagcaagtcatgttcgtcctgacaggcagactctcttatttagtgcaacttttcggaagaagattgaaaagttggccagagacatcctgatcgaccctattcgagtggtgcagggagatattggagaggcaaatgaagatgtgacacagattgtggagattctccattctggacctagtaaatggaactggcttacccggcgtctggtagaatttacctcttcagggagtgtcctcctctttgttactaaaaaagccaatgctgaagagctagcgaataaccttaaacaggagggtcataatcttgggctgctccatggggatatggatcagagtgagagaaacaaggtcatttcagactttaagaaaaaggacatcccagtcctggtggccacagatgttgcagcccgtggtctggacattccttcaattaagactgtcattaactatgatgtggcacgagacattgatacccacacgcataggattggccgcacaggaagagcgggtgagaaaggtgtggcctataccctactcactcccaaggacagcaattttgctggtgacctggtccggaacttggaaggagccaatcaacacgtttctaaggaactcctagatctggcaatgcagaatgcctggtttcggaaatctcgattcaaaggagggaaaggaaaaaagctgaacattggtggaggaggcctaggctacagggagcggcctggcctgggctctgagaacatggatcgaggaaataacaatgtaatgagcaattatgaggcctacaagccttccacaggagctatgggagatcgactaacggcaatgaaagcagctttccagtcacagtacaagagtcactttgttgcagccagtttaagtaatcagaaggctggaagttctgctgctggggcaagtgggtggactagtgcagggagcttgaattctgttccaactaactcagcacaacagggccataacagtcctgacagccccgtcaccagtgccgccaagggcatcccaggctttggcaatactggcaacatcagtggtgcccctgtgacctacccgtctgccggagcccaaggagtcaacaacacagcttcagggaataacagccgagaagggactgggggcagcaacgggaaaagagagagatatactgagaaccggggcagcagccgtcacagtcacggagagactggcaatcggcatagcgatagtccacgtcacggagatggtggtcgccatggagatggataccgccatccagaaagcagcagccgtcatactgatggccatcggcacggggagaacagacatggaggaagcgcaggccggcatggggagaaccggggtgcaaatgatggtcggaatggggaaagcaggaaagaagcttttaatcgtgagagcaagatggagcccaagatggaacccaaagtggacagcagcaagatggacaaggtggacagcaagacagataagacagctgacggctttgctgtcccagagccgcctaaacgcaagaaaagtcgatgggacagttag

SEQ ID NO: 784 - DNA, 3060 bp, Homo Sapiens
atgctttggagggtgcttttgtcaaagaggcctcctttccctcacccagagctggatttccaagaggctcccatacctagctgccctggcagactcccagggaggaaaaacagcgtggccttggcagctgccccgaggaaggagcccacaggtgacagggagaagccattgccattccctgtcctggcccccttcagcaaccctgaacactctgctccagccaaggtggtgagggcagctgttcctaaacagcgcaaaggcagcaaggttggtgactttggagatgcaatcaattggcccacacctggagagatagcccacaagagtgttcagccacagtcccacaagcctcagcctacccgtaaactgccacccaagaaggacatgaaggaacaggagaaaggagaagggagtgatagtaaggagagtccaaaaaccaaatcagatgaatcaggggaggaaaagaatggagatgaggattgccagcgaggcgggcagaagaagaaaggaaacaaacacaagtgggttccattacaaatagacatgaagcctgaagtgcccagagagaaactggcttcacgccccactcgcccaccggagcctagacacatacctgccaatcgcggagagatcaaagggtctgagtctgccacctacgtgcccgtggccccccccaccccagcctggcaaccagagatcaaaccggagcctgcctggcacgaccaggatgagacatcgagtgtgaagagtgatggggctggtggggcgcgggcttccttccgtggccgtggacgggggcgtggtcgcggccggggacgcggccggggtggcactcgaacccattttgactaccagtttggctaccgaaagtttgatggtgtggaggggcctcgtacgcccaagtacatgaacaacatcacctactactttgacaatgtcagcagcaccgagctttacagtgtggatcaggaactgctcaaagactacatcaagcgccagattgaatactacttcagcgtggacaatttagagcgagacttcttcctgcgaaggaaaatggatgctgatggtttcctacccatcacccttattgcttccttccaccgagtgcaggcccttaccactgacatttcactcatctttgcggccctaaaggacagcaaggtggtggagatcgttgatgagaaagttcgtaggagggaggaaccagaaaagtggcctcttcccccaatagtggattattcacagactgatttctcccagcttctcaactgccctgaatttgttccccgtcagcactaccaaaaggagacagagtcggcacctggctctcctcgtgcagtcaccccagtgccaaccaaaacagaggaggtcagcaacctaaagacactacccaagggcctgtctgccagcctgcctgacctggattctgagaactggattgaagtgaagaagaggcctcggccatccccagcacggcccaagaagtcagaggagtccagattttcccacctgacctctctgcctcagcagctgccttcccagcagctgatgtccaaggatcaggatgagcaagaggaactggattttctgtttgacgaggagatggagcagatggatgggcggaagaacaccttcactgcctggtctgatgaggaatctgactatgagattgatgacagggatgtcaacaagatcctcattgtcacccagacaccacattacatgcgccggcacccagggggggaccgcacaggcaaccacacctcgcgtgccaagatgagcgccgaactggccaaggtcattaatgatggcctcttctactatgagcaggacctgtgggctgaaaagtttgaacctgagtattcccagatcaagcaagaagtcgagaacttcaaaaaggtcaatatgatcagccgggagcagtttgacacactgacccctgagccccctgtggatcccaaccaggaagttcctcctgggccacctcggttccagcaagttcctacggatgccctggccaacaagttgtttggtgctcctgagccctccaccatcgcccgctctctaccaaccactgtcccagagtcaccaaactaccgcaacaccaggacccctcgcactccccggacaccacagctcaaagactcaagccagacatcacggttttacccagtggtgaaagaaggacggacactggatgccaagatgcctcgaaaaagaaagacaagacacagttcaaacccacccttggagagccatgtgggctgggtgatggattcccgtgagcacaggccccgtactgcttccatcagctccagcccctcagaagggacgcctacagttggcagctatggctgtacccctcagtcattgcccaagttccagcatccttcccatgaactgctcaaggaaaatggcttcacacaacacgtctaccataagtatcgtaggcgctgccttaatgagcggaaacgcttgggcattggccagtctcaggagatgaacacactcttccgcttctggtccttcttcctccgagatcacttcaacaaaaagatgtatgaggagttcaagcagctggctctggaggacgccaaagaaggctacagatatggtttggagtgcctttttcgatactacagttatggcctggaaaagaagttccggctggacatattcaaggattttcaggaggaaacggtgaaggactatgaagctggccaactgtatgggctggagaagttctgggccttcttgaaatattccaaagccaaaaatttggacattgaccccaaactgcaagaatacctcggcaaattccgacgtcttgaagacttccgagtagatccccccatgggtgaggagggcaaccacaagcgacactcagtggtagcaggaggtggcggcggtgagggcaggaagcggtgcccctcccagtcttccagcaggcctgctgccatgatcagccaaccccctacaccacccaccggccagcctgtccgggaagatgccaaatggacaagccagcactcgaacacacagactttgggaaagtga

SEQ ID NO: 785 - DNA, 669 bp, Homo Sapiens
atgaactccaacgtggagaacctacccccgcacatcatccgcctggtgtacaaggaggtgacgacactgaccgcagacccacccgatggcatcaaggtctttcccaacgaggaggacctcaccgacctccaggtcaccatcgagggccctgaggggaccccatatgctggaggtctgttccgcatgaaactcctgctggggaaggacttccctgcctccccacccaagggctacttcctgaccaagatcttccacccgaacgtgggcgccaatggcgagatctgcgtcaacgtgctcaagagggactggacggctgagctgggcatccgacacgtactgctgaccatcaagtgcctgctgatccaccctaaccccgagtctgcactcaacgaggaggcgggccgcctgctcttggagaactacgaggagtatgcggctcgggcccgtctgctcacagagatccacgggggcgccggcgggcccagcggcagggccgaagccggtcgggccctggccagtggcactgaagcttcctccaccgaccctggggccccagggggcccgggaggggctgagggtcccatggccaagaagcatgctggcgagcgcgataagaagctggcggccaagaaaaagacggacaagaagcgggcgctgcggcggctgtag

SEQ ID NO: 786 - DNA, 6723 bp, Homo Sapiens
atgttgccctgtaagaagagaagaactacagtgacagagtccctacagcataaaggcaatcaagaggaaaacaacgtagacctagaatcagccgttaaaccagaatctgaccaggttaaggacttgagttcggtgtcactatcctgggatccaagtcatggcagagtagctggcttcgaagtacagtctttgcaggatgcaggaaatcagcttggtatggaggatacatctctgagctctggaatgctcacccagaacacaaatgtaccaattctagaaggtgttgatgtggccatctctcagggaatcaccctaccttccttggagtcttttcacccccttaatatacacattggtaaaggaaaactccacgctactggctcaaagagagggaaaaaaatgacactcaggcctgggccagttacccaagaagacagatgtgatcatcttaccctaaaggagcctttttcaggagagcctagtgaagaagtcaaggaagaaggagggaaacctcaaatgaattctgaaggggagataccttccctgccatcaggcagccaatctgcaaaaccagtaagccagcccaggaaatcaacccagccagatgtttgtgcctctcctcaagaaaagccactcaggactctgtttcaccaacctgaggaagagatagaagatggtggactcttcattccaatggaagaacaagacaatgaagaaagtgagaaaaggagaaaaaagaaaaagggtaccaagaggaaacgagatggaaggggtcaagaagggaccttggcatatgacctgaaactggatgacatgcttgaccgtaccttggaggatggtgccaagcagcacaatctaacagcagtcaatgtccgaaacatccttcatgaagtaatcacaaatgaacacgtggtagctatgatgaaagcagccatcagtgagacggaagatatgccaatgtttgagcctaaaatgacacgctctaaactgaaggaagtagtggaaaaaggagtggtaattccaacatggaatatttcaccaattaagaaggccaatgaaattaagcctcctcagtttgtggatatccaccttgaagaagatgattcctcagatgaagaataccagccggatgatgaagaagaagatgaaactgctgaagagagcttattggaaagtgatgttgaaagcactgcttcatctccacgtggggcaaagaaatccagattgaggcagtcttctgagatgactgaaacagatgaggagagtggcatattatcagaggctgagaaagtcaccacaccagccatcaggcacatcagtgctgaggtagtgcccatggggcccccgccccctccaaagccgaaacagaccagagatagtactttcatggagaagttacatgcggtagatgaggagctggcttccagtccagtctgcatggattctttccagcccatggatgacagtctcattgcatttcgaacgcgttctaagatgcccctgaaagatgttcccctgggccaattagaggcagagctccaagctccagacatcactccagatatgtatgaccccaatacggcagatgatgaggactggaagatgtggctggggggacttatgaatgatgatgtggggaatgaagatgaagcagatgatgatgatgatccagaatataatttcctggaagacctcgatgaaccagacacagaggatttccggactgaccgggcagtgagaatcaccaaaaaggaagtaaatgagctgatggaagagctgtttgaaactttccaagatgagatgggattctccaacatggaagatgatggcccagaagaggaggagtgtgtagctgagcctcgtcctaactttaacacccctcaagctctacggtttgaggaaccactggccaacctgttaaatgaacaacatcggacagtgaaggagctatttgaacagctgaagatgaagaaatcttcagccaaacagctgcaggaagtagagaaggttaaaccccagagtgagaaagttcatcagactctgattctggacccagcacagaggaagagactccagcagcagatgcagcagcacgttcagctcttgacccaaatccaccttcttgccacctgcaaccccaacctcaatccggaggccactaccaccaggatatttcttaaagagctgggaacctttgctcaaagctccatcgcccttcaccatcagtacaaccccaagtttcagaccctgttccaaccctgtaacttgatgggagctatgcagctgattgaagacttcagcacacatgtcagcattgactgcagccctcataaaactgtcaagaagactgcgaatgaatttccctgtttgccaaagcaagtggcttggattctggccacaagcaaggttttcatgtatccagagttacttccagtgtgttccctgaaggcaaagaatccccaggataagatcgtcttcaccaaggctgaggacaatttgttagctttaggactgaagcattttgaaggaactgagtttcctaatcctctaatcagcaagtaccttctaacctgcaaaactgcccaccaactgacagtgagaatcaagaacctcaacatgaacagagctcctgacaacatcattaaattttataagaagaccaaacagctgccagtcctaggaaaatgctgtgaagagatccagccacatcagtggaagccacctatagagagagaagaacaccggctcccattctggttaaaggccagtctgccatccatccaggaagaactgcggcacatggctgatggtgctagagaggtaggaaatatgactggaaccactgagatcaactcagatcgaagcctagaaaaagacaatttggagttggggagtgaatctcggtacccactgctattgcctaagggtgtagtcctgaaactgaagccagttgccacccgtttccccaggaaggcttggagacagaagcgttcatcagtcctgaagcccctccttatccaacccagcccctctctccagcccagcttcaaccctgggaaaacaccagcccgatcaactcattcagaagcccctccgagcaaaatggtgctccggattcctcacccaatacagccagccactgttttacagacagttccaggtgtccctccactgggggtcagtggaggtgagagttttgagtctcctgcagcactgcctgctgtgccccctgaggccaggacaagcttccctctgtctgagtcccagactttgctctcttctgcccctgtgcccaaggtaatgctgccctcccttgccccttctaagtttcgaaagccatatgtgagacggagaccctcaaagagaagaggagtcaaggcctctccctgtatgaaacctgcccctgttatccaccaccctgcatctgttatcttcactgttcctgctaccactgtgaagattgtgagccttggcggtggctgtaacatgatccagcctgtcaatgcggctgtggcccagagtccccagactattcccatcactaccctcttggttaaccctacttccttcccctgtccattgaaccagtcccttgtggcctcctctgtctcacccttaattgtttctggcaattctgtgaatcttcctataccatccacccctgaagataaggcccacgtgaatgtggacattgcttgtgctgtggctgatggggaaaatgcctttcagggcctagaacccaaattagagccccaggaactatctcctctctctgctactgttttcccgaaagtggaacatagcccagggcctccactagcagatgcagagtgccaagaaggattgtcagagaatagtgcctgtcgctggaccgttgtgaaaacagaggaggggaggcaagctctggagccgctccctcagggcatccaggagtctctaaacaaccctacccctggggatttagaggaaattgtcaagatggaacctgaagaagctagagaggaaatcagtggatcccctgagcgtgatatttgtgatgacatcaaagtggaacatgctgtggaattggacactggtgccccaagcgaggagttgagcagtgctggagaagtaacgaaacagacagtcttacagaaggaagaggagaggagtcagccaactaaaaccccttcatcttctcaagagccccctgatgaaggaacctcagggacagatgtgaacaaaggatcatcaaagaatgctttgtcctcaatggatcctgaagtgaggcttagtagccccccagggaagccagaagattcatccagtgttgatggtcagtcagtggggactccagttgggccagaaactggaggagagaagaatgggccagaagaagaggaagaagaggactttgatgacctcacccaagatgaggaagatgaaatgtcatcagcttctgaggaatctgtgctttctgtcccagaactccaggaaacaatggagaaactgacttggctggcatctgaaaggcgcatgagtcaggagggtgagtctgaagaagagaattctcaggaggagaactctgagccagaagaagaggaggaagaagaagcagaaggaatggaaagcctgcagaaagaggatgaaatgacggatgaagcagttggagactctgctgagaagcctcctacttttgcttcacctgagactgctccagaagtggagaccagcagaactccaccaggagagagcatcaaagctgctggaaaaggccggaacaatcatcgagctcgcaacaagcggggaagtcgggctcgggccagcaaggacacctccaagctgctgttgctgtatgatgaggacattctcgagcgagatccactcagggagcagaaggacttggcctttgcccaagcttatctgaccagggtgcgagaagccctacaacatatccctggcaagtatgaagacttccttcaagtcatctatgaatttgagtcaagtacccagagacggacggctgtagatctctacaaaagcctgcaaattctgctccaagactggcctcagctgttgaaagactttgctgctttcctgttacctgagcaagctctggcctgtggattatttgaggagcagcaggcttttgagaagagccgcaagttccttcggcagctggagatttgctttgcagagaacccctcacaccaccagaagattatcaaggtcctccaaggctgtgcagactgccttccccaggagatcaccgagctcaagacacagatgtggcagctcctcaagggccacgaccacctgcaggatgagttttctatcttctttgaccacttgcgcccagcagctagccggatgggtgactttgaagagatcaattggactgaggaaaaggagtatgagtttgatggctttgaagaagtggccctgcctgatgtggaagaagaggaggagcctcccaagatacccacagcctcaaagaacaagaggaaaaaagagatcggggtccaaaatcatgataaggagactgaatggccagatggggccaaggactgtgcctgctcctgccatgaaggaggtccagattccaagctgaagaagagcaaaaggcggagctgtagccactgtagcagcaaggtctgtgacagcaaatcctacaagagcaaggagccccatgagttggtgggcagcagcccccaccgagaggctagtcctatgcctggtgctaaggaagctgggcagggcaaggatatgatggaagaggaagccccagaggagcgggagagcactgaggccacccagagcaggactgtcaggaccaccagaaagggagagatgcctgtttcaggattggcagtggggagcactttgccatcccctcgagaagtgactgttacagaacggctcctcctggatggcccaccacctcattcaccagagactcctcaatttccccccacaactggagctgtactgtacactgttaagagaaaccaggttgggcctgaggttcgctcctgccccaaggcatcccccagacttcagaaagagagggagggccaaaaggcagtgagtgagtcagaggctttgatgctggtctgggatgcatcagaaactgagaaattgcctggtaccgtggaaccccctgcttccttcctgagtcctgtttcctcaaagaccagagatgcagggagaagacatgtgtccgggaaaccagacactcaagagagatggctgccctcaagcagagctcgggtgaagacaagagacaggacgtgccctgtccatgaatctccatcaggaattgacacctcagagacttctcccaaagcccctagagggggtttggctaaagacagtggaacacaggccaagggtccagagggggagcagcagccaaaggccgcagaagctacggtgtgtgccaacaacagcaaggtcagctccactggggaaaaggttgtcctgtggacaagggaagctgaccgtgtgatcctcaccatgtgccaggagcaaggggcacagccacagaccttcaacatcatctcccagcagctgggaaataagacccctgctgaggtttcccaccgttttcgagaactcatgcagctcttccacactgcctgtgaagccagctctgaggatgaggatgatgcaaccagtaccagcaatgcagaccagctgtctgaccatggggaccttctgtctgaagaggagctggatgaatga

SEQ ID NO: 787 - DNA, 252 bp, Homo Sapiens
atgtcgggccccaacggagacctggggatgccggtggaggcgggagcggaaggcgaggaggacggcttcggggaagcagaatacgctgccatcaactccatgctggaccagatcaactcctgtctggaccacctggaggagaagaatgaccacctccacgcccgcctccaggagctgctggagtccaaccggcagacacgcctggagttccagcagcagctcggggaggcccccagtgatgccagcccctag

SEQ ID NO: 788 - DNA, 870 bp, Homo Sapiens
atggcgggagctggtcgcggagcagcggtgtccagggtgcaggcgggtcctgggagtccccggcgagcgcgggggcggcagcaagtgcagccgctggggaagcagcgcccagccccgtggcccgggcttcgcagcaaagagaagaagaaagtgaactgcaagcccaagaaccaggacgaacaggagattcctttccggctccgggagattatgaggagccgccaagagatgaaaaacccgatcagtaacaagaagaggaagaaagcagcccaggtgaccttcagaaagacattggagaaggaagcaaagggagaggagcccgacatcgcagtccccaagttcaaacagaggaagggggagtccgacggggcctatatccaccgcatgcagcaagaggcccagcatgtgctgttcctcagcaagaaccaggccatccggcagccagaggtgcaggcagctcccaaggagaagtctgagcagaaaaaagcaaaaaaagcgttccagaagcggcgactagataaagtccgacggaaaaaggaggaaaaggcggcagacaggctggagcaggagttgctccgagacacggtgaagtttggtgaggttgtcctgcagcccccagagctgactgccaggccccagaggagcgtaagcaaggaccagcctggcaggagatcgcagatgctgcggatgcttctgagccccggtggtgtgtcccagcctctgaccgcctccctggcccgccagcggattgtggaggaggagagagagcgggccgtgcaggcctacagagcgttgaagcagcggcagcagcagctgcacggggagcgaccccacctcacttcccggaagaagccagagccgcagctgtga

SEQ ID NO: 789 - DNA, 1398 bp, Homo Sapiens
atgttccgccaggagcagccgttggccgagggcagctttgcgcccatgggctccctgcagccggacgcgggcaacgcgagctggaacgggaccgaggcgccggggggcggcgcccgggccaccccttactccctgcaggtgacgctgacgctggtgtgcctggccggcctgctcatgctgctcaccgtgttcggcaacgtgctcgtcatcatcgccgtgttcacgagccgcgcgctcaaggcgccccaaaacctcttcctggtgtctctggcctcggccgacatcctggtggccacgctcgtcatccctttctcgctggccaacgaggtcatgggctactggtacttcggcaaggcttggtgcgagatctacctggcgctcgacgtgctcttctgcacgtcgtccatcgtgcacctgtgcgccatcagcctggaccgctactggtccatcacacaggccatcgagtacaacctgaagcgcacgccgcgccgcatcaaggccatcatcatcaccgtgtgggtcatctcggccgtcatctccttcccgccgctcatctccatcgagaagaagggcggcggcggcggcccgcagccggccgagccgcgctgcgagatcaacgaccagaagtggtacgtcatctcgtcgtgcatcggctccttcttcgctccctgcctcatcatgatcctggtctacgtgcgcatctaccagatcgccaagcgtcgcacccgcgtgccacccagccgccggggtccggacgccgtcgccgcgccgccggggggcaccgagcgcaggcccaacggtctgggccccgagcgcagcgcgggcccggggggcgcagaggccgaaccgctgcccacccagctcaacggcgcccctggcgagcccgcgccggccgggccgcgcgacaccgacgcgctggacctggaggagagctcgtcttccgaccacgccgagcggcctccagggccccgcagacccgagcgcggtccccggggcaaaggcaaggcccgagcgagccaggtgaagccgggcgacagcctgccgcggcgcgggccgggggcgacggggatcgggacgccggctgcagggccgggggaggagcgcgtcggggctgccaaggcgtcgcgctggcgcgggcggcagaaccgcgagaagcgcttcacgttcgtgctggccgtggtcatcggagtgttcgtggtgtgctggttccccttcttcttcacctacacgctcacggccgtcgggtgctccgtgccacgcacgctcttcaaattcttcttctggttcggctactgcaacagctcgttgaacccggtcatctacaccatcttcaaccacgatttccgccgcgccttcaagaagatcctctgtcggggggacaggaagcggatcgtgtga

SEQ ID NO: 790 - DNA, 543 bp, Homo Sapiens
atggcgcccggagtggcccgcgggccgacgccgtactggaggttgcgcctcggtggcgccgcgctgctcctgctgctcatcccggtggccgccgcgcaggagcctcccggagctgcttgttctcagaacacaaacaaaacctgtgaagagtgcctgaagaacgtctcctgtctttggtgcaacactaacaaggcttgtctggactacccagttacaagcgtcttgccaccggcttccctttgtaaattgagctctgcacgctggggagtttgttgggtgaactttgaggcgctgatcatcaccatgtcggtagtcgggggaaccctcctcctgggcattgccatctgctgctgctgctgctgcaggaggaagaggagccggaagccggacaggagtgaggagaaggccatgcgtgagcgggaggagaggcggatacggcaggaggaacggagagcagagatgaagacaagacatgatgaaatcagaaaaaaatatggcctgtttaaagaagaaaacccgtatgctagatttgaaaacaactaa

SEQ ID NO: 791 - DNA, 762 bp, Homo Sapiens
atgggtgagttcaacgagaagaagacaacatgtggcaccgtttgcctcaagtacctgctgtttacctacaattgctgcttctggctggctggcctggctgtcatggcagtgggcatctggacgctggccctcaagagtgactacatcagcctgctggcctcaggcacctacctggccacagcctacatcctggtggtggcgggcactgtcgtcatggtgactggggtcttgggctgctgcgccaccttcaaggagcgtcggaacctgctgcgcctgtacttcatcctgctcctcatcatctttctgctggagatcatcgctggtatcctcgcctacgcctactaccagcagctgaacacggagctcaaggagaacctgaaggacaccatgaccaagcgctaccaccagccgggccatgaggctgtgaccagcgctgtggaccagctgcagcaggagttccactgctgtggcagcaacaactcacaggactggcgagacagtgagtggatccgctcacaggaggccggtggccgtgtggtcccagacagctgctgcaagacggtggtggctctttgtgggcagcgagaccatgcctccaacatctacaaggtggagggcggctgcatcaccaagttggagaccttcatccaggagcacctgagggtcattggggctgtggggatcggcattgcctgtgtgcaggtctttggcatgatcttcacgtgctgcctgtacaggagtctcaagctggagcactactga

SEQ ID NO: 792 - DNA, 990 bp, Homo Sapiens
atgacccacttcaacaagggcccttcctatgggctctcggccgaagtcaagaacaagattgcttccaagtatgatcatcaggcagaagaagatcttcgcaattggatagaagaggtgacaggcatgagcattggccccaacttccagctgggcttaaaggatggcatcatcctctgcgaacttataaacaagctacagccaggctcagtgaagaaggtcaacgagtcctcactgaactggcctcagttggagaatattggcaactttattaaagctattcaggcttatggtatgaagccacatgacatattcgaagcaaatgatctttttgagaatggaaacatgacccaggttcagactactctggtggctctagcaggtctggctaaaacaaaaggattccatacaaccattgacattggagttaagtatgcagaaaaacaaacaagacgttttgatgaaggaaaattaaaagctggccaaagtgtaattggtctgcagatgggaaccaacaaatgtgccagccaggcaggtatgacagcttacgggactaggaggcatctttatgatcccaaaatgcaaactgacaaaccttttgaccagaccacaattagtctgcagatgggcactaataaaggagccagccaggcagggatgttagcaccaggtaccagaagagacatctatgatcagaagctaacattacagccggtggacaactcgacaatttccctacagatgggtaccaacaaagttgcttcccagaaaggaatgagtgtgtatgggcttgggcggcaagtatatgatcccaaatactgtgctgctcctacagaacctgtcattcacaacggaagccaaggaacaggaacaaatggttcggaaatcagtgatagtgattatcaggcagaataccctgatgagtatcatggcgagtaccaggatgactaccccagagattaccaatatagcgaccaaggcattgattattag

SEQ ID NO: 793 - DNA, 1215 bp, Homo Sapiens
atggccatggtgaccggcggctggggcggccccggcggcgacacgaacggcgtggacaaggcgggcggctacccgcgcgcggccgaggacgactcggcctcgccccccggtgccgccagcgacgccgagccgggcgacgaggagcggccggggctgcaggtggactgcgtggtgtgcggggacaagtcgagcggcaagcattacggtgtcttcacctgcgagggctgcaagagctttttcaagcgaagcatccgccgcaacctcagctacacctgccggtccaaccgtgactgccagatcgaccagcaccaccggaaccagtgccagtactgccgtctcaagaagtgcttccgggtgggcatgaggaaggaggcggtgcagcgcggccgcatcccgcactcgctgcctggtgccgtggccgcctcctcgggcagccccccgggctcggcgctggcggcagtggcgagcggcggagacctcttcccggggcagccggtgtccgaactgatcgcgcagctgctgcgcgctgagccctaccctgcggcggccggacgcttcggcgcagggggcggcgcggcgggcgcggtgctgggcatcgacaacgtgtgcgagctggcggcgcggctgctcttcagcaccgtggagtgggcgcgccacgcgcccttcttccccgagctgccggtggccgaccaggtggcgctgctgcgcctgagctggagcgagctcttcgtgctgaacgcggcgcaggcggcgctgcccctgcacacggcgccgctactggccgccgccggcctccacgccgcgcctatggccgccgagcgcgccgtggctttcatggaccaggtgcgcgccttccaggagcaggtggacaagctgggccgcctgcaggtcgactcggccgagtatggctgcctcaaggccatcgcgctcttcacgcccgacgcctgtggcctctcagacccggcccacgttgagagcctgcaggagaaggcgcaggtggccctcaccgagtatgtgcgggcgcagtacccgtcccagccccagcgcttcgggcgcctgctgctgcggctccccgccctgcgcgcggtccctgcctccctcatctcccagctgttcttcatgcgcctggtggggaagacgcccattgagacactgatcagagacatgctgctgtcggggagtaccttcaactggccctacggctcgggccagtga

SEQ ID NO: 794 - DNA, 579 bp, Homo Sapiens
atgcaggccatcaagtgtgtggtggtgggagacggagctgtaggtaaaacttgcctactgatcagttacacaaccaatgcatttcctggagaatatatccctactgtctttgacaattattctgccaatgttatggtagatggaaaaccggtgaatctgggcttatgggatacagctggacaagaagattatgacagattacgccccctatcctatccgcaaacagatgtgttcttaatttgcttttcccttgtgagtcctgcatcatttgaaaatgtccgtgcaaagtggtatcctgaggtgcggcaccactgtcccaacactcccatcatcctagtgggaactaaacttgatcttagggatgataaagacacgatcgagaaactgaaggagaagaagctgactcccatcacctatccgcagggtctagccatggctaaggagattggtgctgtaaaatacctggagtgctcggcgctcacacagcgaggcctcaagacagtgtttgacgaagcgatccgagcagtcctctgcccgcctcccgtgaagaagaggaagagaaaatgcctgctgttgtaa

SEQ ID NO: 795 - DNA, 459 bp, Homo Sapiens
atggccgggctgccccgcaggatcatcaaggaaacccagcgtttgctggcagaaccagttcctggcatcaaagccgaaccagatgagagcaacgcccgttattttcatgtggtcattgctggccctcaggattccccctttgagggagggacttttaaacttgaactattccttccagaagaatacccaatggcagcccctaaagtacgtttcatgaccaaaatttatcatcctaatgtagacaagttgggaagaatatgtttagatattttgaaagataagtggtccccagcactgcagatccgcacagttctgctatcgatccaggccttgttaagtgctcccaatccagatgatccattagcaaatgatgtagcggagcagtggaagaccaacgaagcccaagccatagaaacagctagagcatggactaggctatatgccatgaataatatttaa

SEQ ID NO: 796 - DNA, 1623 bp, Homo Sapiens
atggactcggtggcttttgaggatgtagatgtgaacttcacccaggaggagtgggctttgctagatccttcccagaagaatctctacagagatgtgatgtgggaaaccatgaggaatctggcctctatagggaaaaaatggaaggaccagaacattaaagatcactacaaacaccgagggagaaatctaagaagtcatatgttagaaagactctatcaaactaaggatggtagtcagcgtggaggaatttttagccagtttgcaaatcagaatctgagcaagaaaatccctggagtgaaactctgtgaaagcattgtatatggagaagtcagcatgggtcagtcatcccttaatagacacatcaaagatcacagtggacatgaaccaaaggaatatcaggaatatggagagaagccagatacacgtaaccagtgttggaaacccttcagttctcaccactcctttcgaacacatgagataattcacactggagagaaactctatgattgtaaggaatgtggaaaaaccttcttttctctcaaaagaattagaagacacatcatcacacacagtggatatacaccatataaatgtaaggtgtgtgggaaagcttttgattatcccagtagatttcgaacacatgaaagaagtcacactggagagaaaccctatgaatgtcaggaatgtggaaaagccttcacttgtatcacaagtgttcgaagacacatgataaagcacactggagatggaccttataaatgtaaggtatgtgggaaaccctttcattctctgagttcatttcaagtgcatgaaagaattcacactggagaaaaaccctttaaatgtaagcaatgtggtaaagccttcagttgttccccaaccttacgaatacatgaaagaacccatactggagagaaaccttatgaatgcaagcagtgtgggaaggccttcagttatctcccctcccttcgactacatgaaagaattcacactggtgagaaacccttcgtatgtaaacaatgtggtaaagcctttagatctgccagtacctttcaaatacatgaaaggactcacactggagaaaaaccttatgaatgtaaggaatgtggggaagcattcagttgtatcccaagtatgcgaagacacatgataaaacatactggagaaggaccttataaatgtaaggtatgtgggaaaccctttcattctctgagtccatttcgaatacatgaaagaactcacactggagagaaaccttatgtatgtaaacattgtggtaaagctttcgtttcttcaacatcaattcgaatacatgaaagaactcatactggagagaaaccctatgagtgtaagcaatgtgggaaagccttcagttatctcaactcctttcgaacacatgaaatgattcacactggtgagaaaccctttgaatgtaagcgatgtggtaaagcctttagatcttctagttcctttcgactacatgaaaggactcacactggacagaaaccctatcattgcaaggaatgtgggaaagcctattcttgccgtgccagctttcagagacacatgttaacacatgctgaagatggaccaccttataaatgcatgtgggaaagcctttaa

SEQ ID NO: 797 - DNA, 1521 bp, Homo Sapiens
atggcctggaactcgccttcccggcgacctgtttggcagggcggggcgcctcgcgaagatggtggcgcgcgtggcgtgtggctcccgtcgtctggccaagtctcagcgcagcgcaccggccggcgtctcgttggcctggagcccacacccaccgggtccctgaccccgcgccccccgcgcccggttcccggcatgcctcgcgcccgtaagggcaacacgctccggaagggtggtcagcgccgtggaggaggtgcccggagcagtgcccaagctgactcgggttccagtgacgatgaggcagccagtgaggcccgcagcaccgccagtgaatgccccagccttctcagcaccactgcagaggacagccttgggggggatgtcgtggatgagcagggccagcaggaagaccttgaggaaaagctgaaggagtatgtggactgtctcacagacaagagtgccaagacccggcagggtgctcttgagagcctgcgcctggccctagcgtcccgcctactccccgacttcttgctggagcgccgcctcacgctagccgatgccctggaaaagtgcctcaagaaagggaagggcgaggaacaagccctggctgctgctgtgctaggcctgctctgcgtgcagctgggccctggacctaagggtgaggagctgtttcacagcctgcagcctctgctggtctctgtgctcagtgacagcacagctagccctgctgcccggctccactgtgcttctgcccttggcctgggctgctacgtggctgccgctgacatccaggacctggtctcttgccttgcctgcttagaaagtgttttcagccggttctatggcttggggggcagctccacaagtcctgtggttcctgccagcctgcacggcctgctctctgctgccctgcaggcctgggcattgctgctcaccatctgccctagcacccaaatcagccacatccttgacaggcagctgccccggctgccccagctcttgtccagtgaaagtgtgaacctgcggatcgctgccggtgaaaccattgcactgctctttgagcttgcccgggaccttgaggaggagtttgtttacgaggacatggaggccctctgcagtgtcctgcgcactctggccactgacagtaacaagtaccgtgccaaggctgatcgtcggcgccagcgctctactttccgcgccgtgctgcactccgtggagggcggtgaatgcgaagaagagatagtgcgcttcggctttgaggtgctctacatggacagctgggctcggcaccggatctacgctgccttcaaggaagtgctgggttcgggcatgcaccaccacctccagaacaatgagctactccgtgacatctttggcctgggccctgtgctgttgctggatgccactgccctgaaggcctgcaaggttccacgctttgagaagcacctgtacaatgctgctgccttcaaagcccggaccaaggctcgaagccgtgtgcgggacaagcgggcagacatcctgtga

SEQ ID NO: 798 - DNA, 972 bp, Homo Sapiens
atggccgcggagctgagcatggggccagagctgcccaccagcccgctggccatggagtatgtcaacgacttcgacctgctcaagttcgacgtgaagaaggagccactggggcgcgcggagcgtccgggcaggccctgcacacgcctgcagccagccggctcggtgtcctccacaccgctcagcactccgtgtagctccgtgccctcgtcgcccagcttcagcccgaccgaacagaagacacacctcgaggatctgtactggatggcgagcaactaccagcagatgaaccccgaggcgctcaacctgacgcccgaggacgcggtggaagcgctcatcggctcgcacccagtgccacagccgctgcaaagcttcgacagctttcgcggcgctcaccaccaccaccatcaccaccaccctcacccgcaccacgcgtacccgggcgccggcgtggcccacgacgagctgggcccgcacgctcacccgcaccatcaccatcatcaccaagcgtcgccgccgccgtccagcgccgctagcccggcgcaacagctgcccactagccaccccgggcccgggccgcacgcgacggcctcggcgacggcggcgggcggcaacggcagcgtggaggaccgcttctccgacgaccagctcgtgtccatgtccgtgcgcgagctgaaccgccacctgcggggcttcaccaaggacgaggtgatccgcctgaagcagaagcggcggaccctgaagaaccggggctacgcccagtcttgcaggtataaacgcgtccagcagaagcaccacctggagaatgagaagacgcagctcattcagcaggtggagcagcttaagcaggaggtgtcccggctggcccgcgagagagacgcctacaaggtcaagtgcgagaaactcgccaactccggcttcagggaggcgggctccaccagcgacagcccctcctctcccgagttctttctgtga

SEQ ID NO: 799 - DNA, 1515 bp, Homo Sapiens
atgggcgctggcggcccccggcggggcgagggccccccagacggcggctggggctgggtggtgctgggcgcctgctttgtggtcaccggcttcgcctacggcttccccaaagccgtgagcgtcttcttccgcgcgctcatgcgcgacttcgacgccggctacagcgacacggcctgggtgtcctccatcatgctagccatgctctacggcacgggccccgtgtccagcatcctcgtgacccgctttggctgtcgcccggtgatgctggcgggtgggctgctggcttccgcgggcatgatcctagcttcctttgccacgcgcctcctggagctctacctgaccgctggggtgctcacaggcctgggcctggccctcaacttccagccgtcgctcatcatgctggggctgtacttcgagcggcggcggcctctggccaacgggctggcggcggcgggcagccccgtgttcctgtccgcgctgtcgccgctcggccagcagctgctggagcgcttcggctggcgcggcggcttcctgctgctcggcgggctcctgctgcactgctgcgcctgcggggctgtcatgaggccgccgcccgggccgggcccgcgaccgcgcagggacagcgccggcgaccgcgccggggacgctccgggcgaggcggaggctgacggtgcggggctgcagctgcgcgaggcatcccccagggtccggccccgccggcgcctgctggacttggcagtgtgcaccgaccgcgccttcgccgtgtacgccgtcaccaagttcctgatggcgctcgggctcttcgtccccgccatcctgctggtgaactacgccaaggacgcgggcgtgcccgacaccgacgccgccttcctgctgtccatcgtgggcttcgtggacatcgtggcgcgcccggcgtgcggcgccctggcgggcctggcgcgtctgcggccgcacgtcccgtatctgttcagcctggccctgctggccaatgggctcacagacctgagcagcgcacgcgcgcgctcctacggcgccctcgtcgccttctgcgtcgccttcggcctctcctacggcatggtgggcgcgctgcagttcgaggtgctcatggcggctgtgggcgcgccccgcttccccagtgcgctgggcctggtgttgctcgtggaggccgcggctgtgctcatcggaccgccctctgccggccgcctggtggatgtgttgaagaactatgagatcatcttctacctggccggctctgaggtggccctggctggggtcttcatggctgtcgccaccaactgctgcctgcgttgtgctaaagctgccccgtcaggcccaggcactgagggcggagccagtgacactgaggacgctgaggctgaaggggactctgagcccctgcctgttgttgcagaggaacccggcaacctggaggccctggaggtgctcagcgcccggggcgagcccacagaaccagaaatagaggcgaggccgaggctggctgccgagtctgtataa

SEQ ID NO: 800 - DNA, 1644 bp, Homo Sapiens
atgactaagacagatcctgccccgatggccccgccaccccgaggagaggaggaagaagaggaggaggaggatgaacccgtccccgaggcccccagccccacccaggagcgccggcagaagcctgttgtgcacccctcggcacctgcccccctccctaaggactacgctttcaccttcttcgatcccaatgacccggcgtgccaggagatcctgtttgaccctcagaccaccatccccgagctgtttgccattgtgcgccagtgggtgccccaagtccagcacaagatagacgtcatcggcaatgagattctgcgccgaggctgccatgtgaacgatcgtgacgggctgaccgacatgacactgctccactatgcgtgcaaagctggggcccacggagtcggggaccccgcggcagccgtgcgcctctcgcagcagctgctggcgctgggcgcagatgtgacgctgcgcagccgctggaccaacatgaacgcgcttcactacgcggcctattttgatgtgcccgacctcgtgcgtgtgctgctgaagggtgcgaggccgcgagtggtgaactccacgtgcagtgacttcaaccacggctcagccctgcacatcgctgcttccagcctgtgcctgggcgccgccaaatgtttgctggagcacggcgccaaccctgcgctgaggaatcgaaaaggacaggtgccggcggaggtggtcccagatcctatggacatgtccctggacaaggcagaggcggcactggtggccaaggagctgcggacgcttctggaagaggcagtgccactatcttgcgccctccccaaggtcacgctacccaactatgacaacgtcccaggcaatctcatgcttagcgcactgggcttgcgcctgggagaccgcgtgctgctggatggccagaagacgggcacactgcggttctgtgggaccacggagtttgccagcggccagtgggtgggcgtggagctggacgaacctgagggcaagaacgatggcagcgttgggggcgttcggtacttcatctgccctcccaagcagggtctctttgcctccgtgtccaagatctccaaggcagtggacgcacccccctcctctgtcacctccacaccccggaccccccggatggacttctcccgtgtcaccggcaaaggccgcagggaacacaaaggcaagaagaagaccccatcatccccatctctgggcagcttgcagcagcgtgacggggccaaggctgaggttggagaccaggtccttgtcgcgggccagaagcaggggatcgtgcgcttctacgggaagacagactttgccccaggttactggtatggcattgagctggaccagcccacaggcaagcatgatggctctgtcttcggtgtccggtacttcacttgccccccgaggcatggggtcttcgcaccagcatcccgtattcagaggattggcggatccactgattcccccggggacagcgttggagccaaaaaagtgcatcaagtgacaatgacgcagcccaaacgcaccttcaccacagtccggaccccaaaggacattgcatcagagaactccatttccaggttgctgttctgctgctggttcccctggatgctgagggcggagatgcagtcttag

SEQ ID NO: 801 - DNA, 1548 bp, Homo Sapiens
atgggactattggcattcagggatgtggctctagaattctctccagaggagtgggaatgcctggacccagctcagcggagtttgtatagggatgtgatgttagagaactacagaaacctgatctcccttggtgaggatagcttcaatatgcaattcctatttcacagtcttgctatgtctaagccagaactgatcatctgtctggaggcaaggaaagagccctggaacgtgaacacagagaagacagccaaacactcagttttgtcttcttatcttactgaagacattttgccagagcagggcctgcaagtttcattccaaaaagtgatgctgagaagatatgaaagatgttgtcttgagaaattacgcttaaggaatgactgggaaattgtgggtgagtggaaagggcagaaggcaagttataatggacttgacctatgctcagcaactactcatagcaaaaactttcaatgcaataaatgtgtgaaaggttttagtaaatttgcaaatctaaataaatgtaagataagccatactggagaaaaaccattcaaatgcaaagaatgtggcaatgtctcttgcatgtctttaataatgactcaacagcagagaatccatattggagagaacccgtaccaatgtaaaaaatgtggcaaagcctttaatgagtgctcatgctttactgactgtaagagaattcatgttggagagaaacattgcaaatgtgaagaatgtaataacatttttaagtcttgctcaagtcttgctgttgttgagaaaaatcatactgaaaagaaaacctacagatgtgaagaatgtggcaaagcttttaacctgtgctcagttcttactaaacataagaaaattcatactggagagaaaccatacaaatgtgaagaatgtggcaaatcctttaagttgttcccataccttactcaacacaagagaattcatagtagagagaaaccctacaagtgtgaagaatgtggcaaagtctttaaattgttgtcataccttactcaacatagaagaattcatactggagagaaaaccttccgatgtgaagaatgtggaaaagcctttaaccagagctcacatctgactgaacataggagaattcatactggtgagaaaccatacaaatgtgaggaatgtggcaaagcttttacctggttctcataccttattcagcataagagaattcatactgggcagaaaccctacaaatgtgaggaatgtggcaaagcttttacctggttttcataccttactcaacataagagaattcatactggagagaaaccctacaaatgtgatgaatgtggcaaagcttttaactggttttcatatcttactaatcataagagaattcatactggagagaaaccctacaaatgtgaagaatgtggcaaagcctttggccagagctcacacctttctaaacataagacaattcataccagagagaaaccatacaagtgtgaggaatgtggcaaagcctttaaccactctgcacaacttgctgtacatgagaaaactcatacctga

SEQ ID NO: 802 - DNA, 3108 bp, Homo Sapiens
atggcagcagagacactcaactttgggcctgagtggctcagggccctgtccgggggcggcagcgtggcctccccacccccgtcccctgccatgcccaaatacaagctggctgactaccgttatgggcgagaggaaatgctggctctctacgtcaaggagaacaaggtcccggaagagctgcaggacaaggagttcgccgcggtgctgcaggacgagccactgcagcccctggctctggagccgctgactgaggaggaacagagaaacttctccctgtcagtgaacagcgtggctgtgctgaggctgatggggaaaggggctggcccccccctggctggcacctcccgaggcaggggcagcacgcggagccgaggccgcggccgtggtgacagctgcttttaccaaagaagcatcgaagaaggcgatggggcctttggacgaagcccccgggaaatccagcgcagccagagctgggatgacagaggcgagaggcggtttgagaagtcagcaaggcgggatggagcacgatgtggctttgaggagggaggggctggcccaaggaaggagcacgcccgctcagacagcgagaactggcgctccctacgggaggaacaggaggaggaggaggagggcagctggaggctcggagcagggccccggcgagacggcgaccgctggcgctccgccagccctgatggtggtccccgctctgctggctggcgggaacatggggaacggcggcgcaagtttgaatttgatttgcgaggggatcgaggagggtgtggtgaagaggaggggcggggagggggaggcagctctcacctgcggcggtgccgagcgcctgaaggctttgaggaggacaaggatgggctcccagagtggtgcctggacgatgaggatgaagaaatgggcacctttgatgcctctggggccttcttgcctctcaagaagggccccaaggagcccattcctgaggagcaggagctggacttccaagggttggaggaggaggaggaaccttccgaagggctagaggaggaagggcctgaggcaggtgggaaagagctgaccccactgcctcctcaggaggagaagtccagctccccatccccactgcccaccctgggcccactctgggggacaaacggggatggggacgaaactgcagagaaagagcccccagcggccgaagatgatattcgggggatccagctgagtcccggggtgggctcctctgctggcccacccggagatctggaggatgatgaaggcttgaagcacctgcagcaggaggcggagaagctggtggcctccctgcaggacagctccttggaggaggagcagttcacggctgccatgcagacccagggcctgcgccactctgcagccgccactgccctcccgctcagccatggggctgcccggaagtggttctacaaggacccacagggcgagatccaaggccccttcacgacacaggagatggcagagtggttccaggccggctacttttccatgtcactgctggtgaagcggggctgcgatgagggcttccagccgctgggcgaggtgatcaagatgtggggccgcgtgccctttgccccagggccctcacctcccccactgctgggaaacatggaccaggagcggctgaagaagcaacaggagctggccgcggcggccttgtaccagcagctgcagcaccagcagtttctccagctggtcagcagccgccagctcccacagtgcgcgctccgagaaaaggcagctctgggggacctgacaccgccaccaccgccgccgccacagcagcagcagcagcagctcacggcattcctgcagcagctccaggcgctcaaaccccccagaggcggggaccagaacctgctcccgacgatgagccggtccttgtcggtgccagattcgggccgcctctgggacgtacatacctcagcctcatcacagtcaggtggtgaggccagtctttgggacataccaattaactcttcgactcagggtccaattctagaacaactccagctgcaacataaattccaggagcgcagagaagtggagctcagggcgaagcgggaggaagaggaacgcaagcgtcgagaggagaagcgccgccagcagcagcaggaggagcagaagcggcggcaggaggaggaagagctgtttcggcgcaagcacgtgcggcagcaggagctattgctgaagttgctacagcagcagcaggcggtccctgtgccccccgcacccagctccccgcccccactctgggctggcctggccaagcaggggctgtccatgaagacgctcctggagttgcagctggagggcgagcggcagctgcacaaacagcccccacctcgggagccagctcgggcccaggcccccaaccaccgagtgcagcttgggggcctgggcactgcccccctgaaccagtgggtgtctgaggctgggccactgtggggcgggccagacaagagtgggggcggcagcagcggcctggggctctgggaggacacccccaagagcggcgggagcctggtccgtggcctcggcctgaagaacagccggagcagcccatctctcagtgactcatacagccacctatcgggtcggcccattcgcaaaaagacggaggaagaagagaagctgctgaagctgctgcagggcattcccaggccccaggacggcttcacccagtggtgcgagcagatgctgcacacgctgagcgccacgggcagcctggacgtgcccatggctgtagcgatcctcaaggaggtggaatccccctatgatgtccacgattatatccgttcctgcctgggggacacgctggaagccaaagaatttgccaaacaattcctggagcggagggccaagcagaaagccagccagcagcggcagcagcagcaggaggcatggctgagcagcgcctcgctgcagacggccttccaggccaaccacagcaccaaactcggccccggggagggcagcaaggccaagaggcgggcactgatgctgcactcagaccccagcatcctggggtactccctgcacggatcttctggtgagatcgagagcgtggatgactactga

SEQ ID NO: 803 - DNA, 2061 bp, Homo Sapiens
atgggtgaatttaaggtccatcgagtacgtttctttaattatgttccatcaggaatccgctgtgtggcttacaataaccagtcaaacagattggctgtttcacgaacagatggcactgtggaaatttataacttgtcagcaaactactttcaggagaaatttttcccaggtcatgagtctcgggctacagaagctttgtgctgggcagaaggacagcgactctttagtgctgggctcaatggcgagattatggagtatgatttacaggcgttaaacatcaagtatgctatggatgcctttggaggacctatttggagcatggctgccagccccagtggctctcaacttttggttggttgtgaagatggatctgtgaaactatttcaaattaccccagacaaaatccagtttgaaagaaattttgatcggcagaaaagtcgcatcctgagtctcagctggcatccctctggtacccacattgcagctggttccatagactacattagtgtgtttgatgtcaaatcaggcagcgctgttcataagatgattgtggacaggcagtatatgggcgtgtctaagcggaagtgcatcgtgtggggtgtcgccttcttgtccgatggcactatcataagtgtggactctgctgggaaggtgcagttctgggactcagccactgggacgcttgtgaagagccatctcatcgctaatgctgacgtgcagtccattgctgtagctgaccaagaagacagtttcgtggtgggcacagccgagggaacagtcttccattttcagctggtccctgtgacatctaacagcagtgagaagcagtgggtgcggacaaaaccgttccagcatcacactcatgacgtgcgcactgtggcccacagcccaacagcgctgatatctggaggcactgacacccacttagtctttcgtcctctcatggagaaggtggaagtaaagaattacgatgccgctctccgaaaaatcacctttccccaccgatgtctcatctcctgttctaaaaagaggcagcttctcctcttccagtttgctcatcacttagaactttggcgactgggatccacagttgcaacaggcaagaatggggatactcttccactctctaaaaatgcagatcatttactgcacctaaagacaaagggtcctgagaacattatctgtagctgtatctccccatgtggaagttggatagcctattctacagtttctcggttttttctctatcggctgaattatgaacatgacaacataagcctcaaaagggtttccaaaatgccagcattccttcgctctgcccttcagattttgttttctgaagattcaacaaagctctttgtagcatcaaatcaaggagctctgcatattgttcagctgtcaggaggaagcttcaagcacctgcatgctttccagcctcagtcaggaacagtggaggccatgtgtcttttggcagtcagtccagatgggaattggctagctgcatcaggtaccagtgctggagtccatgtctacaacgtaaaacagctaaagcttcactgcacggtgcctgcttacaatttcccagtgactgctatggctattgcccccaataccaacaaccttgtcatcgctcattcggaccagcaggtatttgagtacagcatcccagacaaacagtatacagattggagccggactgtccagaagcagggctttcaccacctttggctccaaagggatactcctatcacacacatcagttttcatcccaagagaccgatgcacatccttctccatgatgcctacatgttctgcatcattgacaagtcattgccccttccaaatgacaaaaccttactctacaatccatttcctcccacgaatgaatcagatgtcatccggaggcgcacagctcatgcttttaaaatttctaagatatataagcctctactcttcatggatcttttggatgaaagaacactcgtggcagtagaacggcctctggatgacatcattgctcagctcccaccacccattaaaaagaagaaatttggaacctaa

SEQ ID NO: 804 - DNA, 1443 bp, Homo Sapiens
atgagcgacgtggctattgtgaaggagggttggctgcacaaacgaggggagtacatcaagacctggcggccacgctacttcctcctcaagaatgatggcaccttcattggctacaaggagcggccgcaggatgtggaccaacgtgaggctcccctcaacaacttctctgtggcgcagtgccagctgatgaagacggagcggccccggcccaacaccttcatcatccgctgcctgcagtggaccactgtcatcgaacgcaccttccatgtggagactcctgaggagcgggaggagtggacaaccgccatccagactgtggctgacggcctcaagaagcaggaggaggaggagatggacttccggtcgggctcacccagtgacaactcaggggctgaagagatggaggtgtccctggccaagcccaagcaccgcgtgaccatgaacgagtttgagtacctgaagctgctgggcaagggcactttcggcaaggtgatcctggtgaaggagaaggccacaggccgctactacgccatgaagatcctcaagaaggaagtcatcgtggccaaggacgaggtggcccacacactcaccgagaaccgcgtcctgcagaactccaggcaccccttcctcacagccctgaagtactctttccagacccacgaccgcctctgctttgtcatggagtacgccaacgggggcgagctgttcttccacctgtcccgggagcgtgtgttctccgaggaccgggcccgcttctatggcgctgagattgtgtcagccctggactacctgcactcggagaagaacgtggtgtaccgggacctcaagctggagaacctcatgctggacaaggacgggcacattaagatcacagacttcgggctgtgcaaggaggggatcaaggacggtgccaccatgaagaccttttgcggcacacctgagtacctggcccccgaggtgctggaggacaatgactacggccgtgcagtggactggtgggggctgggcgtggtcatgtacgagatgatgtgcggtcgcctgcccttctacaaccaggaccatgagaagctttttgagctcatcctcatggaggagatccgcttcccgcgcacgcttggtcccgaggccaagtccttgctttcagggctgctcaagaaggaccccaagcagaggcttggcgggggctccgaggacgccaaggagatcatgcagcatcgcttctttgccggtatcgtgtggcagcacgtgtacgagaagaagctcagcccacccttcaagccccaggtcacgtcggagactgacaccaggtattttgatgaggagttcacggcccagatgatcaccatcacaccacctgaccaagatgacagcatggagtgtgtggacagcgagcgcaggccccacttcccccagttctcctactcggccagcggcacggcctga

SEQ ID NO: 805 - DNA, 897 bp, Homo Sapiens
atggtaagaatggtgcctgtcctgctgtctctgctgctgcttctgggtcctgctgtcccccaggagaaccaagatggtcgttactctctgacctatatctacactgggctgtccaagcatgttgaagacgtccccgcgtttcaggcccttggctcactcaatgacctccagttctttagatacaacagtaaagacaggaagtctcagcccatgggactctggagacaggtggaaggaatggaggattggaagcaggacagccaacttcagaaggccagggaggacatctttatggagaccctgaaagacatcgtggagtattacaacgacagtaacgggtctcacgtattgcagggaaggtttggttgtgagatcgagaataacagaagcagcggagcattctggaaatattactatgatggaaaggactacattgaattcaacaaagaaatcccagcctgggtccccttcgacccagcagcccagataaccaagcagaagtgggaggcagaaccagtctacgtgcagcgggccaaggcttacctggaggaggagtgccctgcgactctgcggaaatacctgaaatacagcaaaaatatcctggaccggcaagatcctccctctgtggtggtcaccagccaccaggccccaggagaaaagaagaaactgaagtgcctggcctacgacttctacccagggaaaattgatgtgcactggactcgggccggcgaggtgcaggagcctgagttacggggagatgttcttcacaatggaaatggcacttaccagtcctgggtggtggtggcagtgcccccgcaggacacagccccctactcctgccacgtgcagcacagcagcctggcccagcccctcgtggtgccctgggaggccagctag

SEQ ID NO: 806 - DNA, 1017 bp, Homo Sapiens
atgctctccgccctcgcccggcctgccagcgctgctctccgccgcagcttcagcacctcggcccagaacaatgctaaagtagctgtgctaggggcctctggaggcatcgggcagccactttcacttctcctgaagaacagccccttggtgagccgcctgaccctctatgatatcgcgcacacacccggagtggccgcagatctgagccacatcgagaccaaagccgctgtgaaaggctacctcggacctgaacagctgcctgactgcctgaaaggttgtgatgtggtagttattccggctggagtccccagaaagccaggcatgacccgggacgacctgttcaacaccaatgccacgattgtggccaccctgaccgctgcctgtgcccagcactgcccggaagccatgatctgcgtcattgccaatccggttaattccaccatccccatcacagcagaagttttcaagaagcatggagtgtacaaccccaacaaaatcttcggcgtgacgaccctggacatcgtcagagccaacacctttgttgcagagctgaagggtttggatccagctcgagtcaacgtccctgtcattggtggccatgctgggaagaccatcatccccctgatctctcagtgcacccccaaggtggactttccccaggaccagctgacagcactcactgggcggatccaggaggccggcacggaggtggtcaaggctaaagccggagcaggctctgccaccctctccatggcgtatgccggcgcccgctttgtcttctcccttgtggatgcaatgaatggaaaggaaggtgttgtggaatgttccttcgttaagtcacaggaaacggaatgtacctacttctccacaccgctgctgcttgggaaaaagggcatcgagaagaacctgggcatcggcaaagtctcctcttttgaggagaagatgatctcggatgccatccccgagctgaaggcctccatcaagaagggggaagatttcgtgaagaccctgaagtga

SEQ ID NO: 807 - DNA, 843 bp, Homo Sapiens
atggcggcggtggtcgccctctccttgaggcgccggttgccggccacaacccttggcggagcctgcctgcaggcctcccgaggagcccagacagctgcagccacagctccccgtatcaagaaatttgccatctatcgatgggacccagacaaggctggagacaaacctcatatgcagacttatgaagttgaccttaataaatgtggccccatggtattggatgctttaatcaagattaagaatgaagttgactctactttgaccttccgaagatcatgcagagaaggcatctgtggctcttgtgcaatgaacatcaatggaggcaacactctagcttgcacccgaaggattgacaccaacctcaataaggtctcaaaaatctaccctcttccacacatgtatgtgataaaggatcttgttcccgatttgagcaacttctatgcacagtacaaatccattgagccttatttgaagaagaaggatgaatctcaggaaggcaagcagcagtatctgcagtccatagaagagcgtgagaaactggacgggctctacgagtgcattctctgtgcctgctgtagcaccagctgccccagctactggtggaacggagacaaatatctggggcctgcagttcttatgcaggcctatcgctggatgattgactccagagatgacttcacagaggagcgcctggccaagctgcaggacccattctctctataccgctgccacaccatcatgaactgcacaaggacctgtcctaagggtctgaatccagggaaagctattgcagagatcaagaaaatgatggcaacctataaggagaagaaagcttcagtttaa

SEQ ID NO: 808 - DNA, 2247 bp, Homo Sapiens
atggggcgggccggggctgccgccgtgatcccgggcctggccctgctctgggcagtggggctggggagtgccgcccccagccccccacgccttcggctctccttccaagagctccaggcctggcatggtctccagactttcagcctggagcgaacctgctgctaccaggccttgctggtggatgaggagcgtggacgcctgtttgtgggtgccgagaaccatgtggcctccctcaacctggacaacatcagcaagcgggccaagaagctggcctggccggcccctgtggaatggcgagaggagtgcaactgggcagggaaggacattggtactgagtgcatgaacttcgtgaagttgctgcatgcctacaaccgcacccatttgctggcctgtggcacgggagccttccacccaacctgtgcctttgtggaagtgggccaccgggcagaggagcccgtcctccggctggacccaggaaggatagaggatggcaaggggaagagtccttatgaccccaggcatcgggctgcctccgtgctggtgggggaggagctatactcaggggtggcagcagacctcatgggacgagactttaccatctttcgcagcctagggcaacgtccaagtctccgaacagagccacacgactcccgctggctcaatgagcccaagtttgtcaaggtattttggatcccggagagcgagaacccagacgacgacaaaatctacttcttctttcgtgagacggcggtagaggcggcgccggcactgggacgcctgtccgtgtcccgcgttggccagatctgccggaacgacgtgggcggccagcgcagcctggtcaacaagtggacgacgttcctgaaggcgcggctggtgtgctcggtgcccggcgtcgagggcgacacccacttcgatcagctccaggatgtgtttctgttgtcctcgcgggaccaccggaccccgctgctctatgccgtcttctccacgtccagcatcttccagggctctgcggtgtgcgtgtacagcatgaacgacgtgcgccgggccttcttgggaccctttgcacacaaggaggggcccatgcaccagtgggtgtcataccagggtcgcgtcccctacccgcggccaggcatgtgccccagcaagacctttggcaccttcagttccaccaaggacttcccagacgatgtcatccagtttgcgcggaaccaccccctcatgtacaactctgtcctgcccactggggggcgccctcttttcctacaagttggagccaattacaccttcactcaaattgccgcggaccgggttgcagccgctgacggacactatgacgtcctcttcattggcacagacgttggcacggtgctgaaggtgatctcggtccccaagggcagtaggcccagcgcagaggggctgctcctggaggagctgcacgtgtttgaggactcggccgctgtcaccagcatgcaaatttcttccaagaggcaccagctgtacgtagcctcgcggagcgcggtggcccagatcgcgttgcaccgctgcgctgcccacggccgcgtctgcaccgaatgctgtctggcgcgtgacccctactgcgcctgggacggggtcgcgtgcacgcgcttccagcccagtgccaagaggcggttccggcggcaagacgtaaggaatggcgaccccagcacgttgtgctccggagactcgtctcgtcccgcgctgctggaacacaaggtgttcggcgtggagggcagcagcgcctttctggagtgtgagccccgctcgctgcaggcgcgcgtggagtggactttccagcgcgcaggggtgacagcccacacccaggtgctggcagaggagcgcaccgagcgcaccgcccggggactactgctgcgcaggctgcggcgccgggactcgggcgtgtacttgtgcgccgccgtcgagcagggctttacgcaaccgctgcgtcgcctgtcgctgcacgtgttgagtgctacgcaggccgaacgactggcgcgggccgaggaggctgcgcccgccgcgccgccgggccccaaactctggtaccgggactttctgcagctggtggagccgggcggaggtggcagcgcgaactccctgcgcatgtgccgcccgcagcctgcgctgcagtcactgcccctggagtcgcggagaaagggccgtaaccggaggacccacgcccctgagcctcgcgctgagcgggggccgcgcagcgcaacgcactggtga

SEQ ID NO: 809 - DNA, 1698 bp, Homo Sapiens
atgtccggccggtctaagcgggagtctcgcggttccactcgcgggaagcgagagtctgagtcgcggggcagctccggtcgcgtcaagcgggagcgagatcgggagcgggagcctgaggcggcgagctcccggggcagccctgtgcgcgtgaagcgggagttcgagccggcgagcgcgcgcgaggccccggcttctgttgtcccgtttgtgcgggtgaagcgggagcgcgaggtcgatgaggactcggagcctgagcgggaggtgcgagcaaagaatggccgagtggattctgaggaccggaggagccgccactgcccgtacctggacaccattaacaggagtgtgctggactttgactttgagaaactgtgttctatctccctctcacacatcaatgcttatgcctgtctggtgtgtggcaagtactttcaaggccggggtttgaagtctcacgcctacattcacagtgtccagtttagccaccatgttttcctcaacctccacaccctcaagttttactgccttccagacaactatgagatcatcgattcctcattggaggatatcacgtatgtgttgaagcccactttcacaaagcagcaaattgcaaacttggacaagcaagccaaattgtcccgggcatatgatggtaccacttacctgccgggtattgtgggactgaataacataaaggccaatgattatgccaacgctgtccttcaggctctatctaatgttcctcctctccggaactactttctggaagaagacaattataagaacatcaaacgtcctccaggggatatcatgttcttgttggtccagcgttttggagagctgatgagaaagctctggaaccctcgaaatttcaaggcacatgtgtctccccatgagatgcttcaggcagttgtactttgcagtaagaagacttttcagatcaccaaacaaggagatggcgttgactttctgtcttggtttctgaatgctctgcactcagctctggggggcacaaagaagaaaaagaagactattgtgactgatgttttccaggggtccatgaggatcttcactaaaaagcttccccatcctgatctgccagcagaagaaaaagagcagttgctccataatgacgagtaccaggagacaatggtggagtccacttttatgtacctgacgctggaccttcctactgcccccctctacaaggacgagaaggagcagctcatcattccccaagtgccactcttcaacatcctggctaagttcaatggcatcactgagaaggaatataagacttacaaggagaactttctgaagcgcttccagcttaccaagttgcctccatatctaatcttttgtatcaagagattcactaagaacaacttctttgttgagaagaatccaactattgtcaatttccctattacaaatgtggatctgagagaatacttgtctgaagaagtacaagcagtacacaagaataccacctatgacctcattgccaacatcgtgcatgacggcaagccctccgagggctcctaccggatccacgtgcttcatcatgggacaggcaaatggtatgaattacaagacctccaggtgactgacatccttccccagatgatcacactgtcagaggcttacattcagatttggaagaggcgagataatgatgaaaccaaccagcagggggcttga

SEQ ID NO: 810 - DNA, 984 bp, Homo Sapiens
atggcggcggcggcggcggcggctgcagctacgaacgggaccggaggaagcagcgggatggaggtggatgcagcagtagtccccagcgtgatggcctgcggagtgactgggagtgtttccgtcgctctccatccccttgtcattctcaacatctcagaccactggatccgcatgcgctcccaggaggggcggcctgtgcaggtgattggggctctgattggcaagcaggagggccgaaatatcgaggtgatgaactcctttgagctgctgtcccacaccgtggaagagaagattatcattgacaaggaatattattacaccaaggaggagcagtttaaacaggtgttcaaggagctggagtttctgggttggtataccacaggggggccacctgacccctcggacatccacgtccataagcaggtgtgtgagatcatcgagagccccctctttctgaagttgaaccctatgaccaagcacacagatcttcctgtcagcgtttttgagtctgtcattgatataatcaatggagaggccacaatgctgtttgctgagctgacctacactctggccacagaggaagcggaacgcattggtgtagaccacgtagcccgaatgacagcaacaggcagtggagagaactccactgtggctgaacacctgatagcacagcacagcgccatcaagatgctgcacagccgcgtcaagctcatcttggagtacgtcaaggcctctgaagcgggagaggtcccctttaatcatgagatcctgcgggaggcctatgctctgtgtcactgtctcccggtgctcagcacagacaagttcaagacagatttttatgatcaatgcaacgacgtggggctcatggcctacctcggcaccatcaccaaaacgtgcaacaccatgaaccagtttgtgaacaagttcaatgtcctctacgaccgacaaggcatcggcaggagaatgcgcgggctctttttctga

SEQ ID NO: 811 - DNA, 1935 bp, Homo Sapiens
atggaggccgagcggggtcccgagcgccggcctgcggagcgtagcagcccgggccagacgccggaggagggcgcgcaggccttggccgagttcgcggcgctgcacggcccggcgctgcgcgcttcgggggtccccgaacgttactggggccgcctcctgcacaagctggagcacgaggttttcgacgctggggaagtgtttgggatcatgcaagtggaggaggtagaagaggaggaggacgaggcagcccgggaggtgcggaagcagcagcccaacccggggaacgagctgtgctacaaggtcatcgtgaccagggagagcgggctccaggcagcccaccccaacagcatcttcctcatcgaccacgcctggacgtgccgtgtggagcacgcgcgccagcagctgcagcaggtgcccgggctgctgcaccgcatggccaacctgatgggcattgagttccacggtgagctgcccagtacagaggctgtggccctggtgctggaggagatgtggaagttcaaccagacctaccagctggcccatgggacagctgaggagaagatgccggtgtggtatatcatggacgagttcggttcgcggatccagcacgcggacgtgcccagcttcgccacggcacccttcttctacatgccgcagcaggtggcctacacgctgctgtggcccctgagggacctggacactggcgaggaggtgacccgagactttgcctacggagagacggaccccctgatccggaagtgcatgctgctgccctgggcccccaccgacatgctggacctcagctcttgcacacccgagccgcccgccgagcactaccaggccattctggaggaaaacaaggagaagctgccacttgacatcaaccccgtggtgcacccccacggccacatcttcaaggtctacacggacgtgcagcaggtggccagcagcctcacccacccgcgcttcaccctcacccagagtgaggcggacgccgacatcctcttcaacttctcacacttcaaggactacaggaaactcagccaggagaggccaggcgtgctgctgaaccagttcccctgcgagaacctgctgactgtcaaggactgcctggcctccatcgcgcgccgggcaggtggccccgagggcccaccctggctgccccgaaccttcaacctgcgcactgagctgccccagtttgtcagctacttccagcagcgggaaaggtggggcgaggacaaccactggatctgcaagccctggaacctggcgcgcagcctggacacccacgtcaccaagagcctgcacagcatcatccggcaccgagagagcacccccaaggttgtgtccaagtacatcgaaagtcccgtgttgttccttcgagaagacgtgggaaaggtcaagttcgacatccgctacatcgtgctgctgcggtcagtgaggcccctacggttgttcgtgtatgatgtgttctggctgcggttctccaaccgggcctttgcactcaacgacctggatgactacgagaagcacttcacggtcatgaactatgacccggatgtggtgctgaagcaggtgcactgtgaagagttcatccccgagtttgagaagcaatacccagaatttccctggacggacgtccaggctgagatcttccgggccttcacggagctgttccaggtggcctgtgccaagccaccacccctgggcctctgcgactacccctcatcccgggccatgtatgccgtcgacctcatgctgaagtgggacaacggcccagatggaaggcgggtgatgcagccgcagatcctggaggtgaacttcaaccccgactgtgagcgagcctgcaggtaccaccccaccttcttcaacgacgtcttcagcaccttgtttctggaccagcccggtggctgccacgttacctgccttgtctag

SEQ ID NO: 812 - DNA, 234 bp, Homo Sapiens
atgtcggtggccttcgtaccggactggctgaggggcaaggcggaagtcaatcaagagactatccagcggctccttgaggagaatgaccagctgatccgctgtattgtggagtatcagaacaagggccgcgggaacgagtgcgtgcagtaccagcatgtgttacatagaaatctcatttatttggctaccattgcagatgccagtccaaccagcacttcaaaagcaatggaataa

SEQ ID NO: 813 - DNA, 633 bp, Homo Sapiens
atggcgaccgagacggtggagctccataagctaaagcttgccgaactaaagcaagaatgtcttgctcgtggtttggagaccaagggaataaagcaagatcttatccacagactccaggcatatcttgaagaacatgctgaagaggaggcaaatgaagaagatgtactgggagatgaaacagaggaagaagaaacaaagcccattgagctccctgtcaaagaggaagaaccccctgaaaaaactgttgatgtggcagcagagaagaaagtggtgaaaattacatctgaaataccacagactgagagaatgcagaagagggctgaacgattcaatgtacctgtgagcttggagagtaagaaagctgctcgggcagctaggtttgggatttcttcagttccaacaaaaggtctgtcatctgataacaaacctatggttaacttggataagctgaaggaaagagctcaaagatttggtttgaatgtctcttcaatctccagaaagtctgaagatgatgagaaactgaaaaagaggaaggagcgatttgggattgtcacaagttcagctggaactggaaccacagaggatacagaggcaaagaagaggaaaagagcagagcgctttgggattgcctga

SEQ ID NO: 814 - DNA, 354 bp, Homo Sapiens
atgacagtgctggaggccgtcttggagatccaggccatcactggcagcaggctgctctccatggtgccagggcccgccaggccaccaggctcatgctgggacccaacccagtgcacaaggacttggctgctgagccacacacccaggagaaggtggataagtgggctaccaagggcttcctgcaggctaggggaggagccacccccgcttccctattgtgaccaggcctatggggaggagctgtccatacgccaccgtgagacctgggcctggctctcaaggacagacaccgcctggcctggtgctccaggggtgaagcaggccagaatcctgggggagctgctcctggtttga

SEQ ID NO: 815 - DNA, 789 bp, Homo Sapiens
atggcggcagccagcgctggggcaacccggctgctcctgctcttgctgatggcggtagcagcgcccagtcgagcccggggcagcggctgccgggccgggactggtgcgcgaggggctggggcggaaggtcgagagggcgaggcctgtggcacggtggggctgctgctggagcactcatttgagatcgatgacagtgccaacttccggaagcggggctcactgctctggaaccagcaggatggtaccttgtccctgtcacagcggcagctcagcgaggaggagcggggccgactccgggatgtggcagccctgaatggcctgtaccgggtccggatcccaaggcgacccggggccctggatggcctggaagctggtggctatgtctcctcctttgtccctgcgtgctccctggtggagtcgcacctgtcggaccagctgaccctgcacgtggatgtggccggcaacgtggtgggcgtgtcggtggtgacgcaccccgggggctgccggggccatgaggtggaggacgtggacctggagctgttcaacacctcggtgcagctgcagccgcccaccacagccccaggccctgagacggcggccttcattgagcgcctggagatggaacaggcccagaaggccaagaacccccaggagcagaagtccttcttcgccaaatactggatgtacatcattcccgtcgtcctgttcctcatgatgtcaggagcgccagacaccgggggccagggtgggggtgggggtgggggtggtggtgggggtagtggccggtga

SEQ ID NO: 816 - DNA, 582 bp, Homo Sapiens
atgggcaaacagaacagcaagctgcggcccgaggtgctgcaggacctgcgggagaacacggagttcaccgaccacgagctgcaggagtggtacaagggcttcctcaaggactgccccaccggccacctgaccgtggacgagttcaagaagatctacgccaacttcttcccctacggcgacgcttccaagttcgccgagcacgtcttccgcaccttcgacaccaacggcgacggcaccatcgacttccgggagttcatcattgcgctgagcgtgacctcgcggggcaagctggagcagaagctcaagtgggccttcagcatgtacgacctggacggcaacggctacatcagccgcagcgagatgctggagatcgtgcaggccatctacaagatggtgtcgtctgtgatgaagatgccggaggatgagtccaccccggagaagcgcacagacaagatcttcaggcagatggacaccaacaatgacggcaaactgtccttggaagaattcatcagaggtgccaagagcgacccctccatcgtccgcctgctgcagtgcgaccccagcagtgccagtcagttctga

SEQ ID NO: 817 - DNA, 429 bp, Homo Sapiens
atgattgctcctaccgactcccatgaggaagtgcgatcgggaacctcctatatacttccgtttgcctcgcggtttctttctttccgcgccgatagcgctcacgcaagcatggttaacgtccctaaaacccgccggactttctgtaagaagtgtggcaagcaccaaccccataaagtgacacagtacaagaagggcaaggattctctgtacgcccagggaaagcggcgttatgacaggaagcagagtggctatggtgggcaaactaagccgattttccggaaaaaggctaaaactacaaagaagattgtgctaaggcttgagtgcgttgagcccaactgcagatctaagagaatgctggctattaaaagatgcaagcattttgaactgggaggagataagaagagaaagggccaagtgatccagttctaa

SEQ ID NO: 818 - DNA, 933 bp, Homo Sapiens
atgaggcgcgcggcgctctggctctggctgtgcgcgctggcgctgagcctgcagccggccctgccgcaaattgtggctactaatttgccccctgaagatcaagatggctctggggatgactctgacaacttctccggctcaggtgcaggtgctttgcaagatatcaccttgtcacagcagaccccctccacttggaaggacacgcagctcctgacggctattcccacgtctccagaacccaccggcctggaggctacagctgcctccacctccaccctgccggctggagaggggcccaaggagggagaggctgtagtcctgccagaagtggagcctggcctcaccgcccgggagcaggaggccaccccccgacccagggagaccacacagctcccgaccactcatcaggcctcaacgaccacagccaccacggcccaggagcccgccacctcccacccccacagggacatgcagcctggccaccatgagacctcaacccctgcaggacccagccaagctgaccttcacactccccacacagaggatggaggtccttctgccaccgagagggctgctgaggatggagcctccagtcagctcccagcagcagagggctctggggagcaggacttcacctttgaaacctcgggggagaatacggctgtagtggccgtggagcctgaccgccggaaccagtccccagtggatcagggggccacgggggcctcacagggcctcctggacaggaaagaggtgctgggaggggtcattgccggaggcctcgtggggctcatctttgctgtgtgcctggtgggtttcatgctgtaccgcatgaagaagaaggacgaaggcagctactccttggaggagccgaaacaagccaacggcggggcctaccagaagcccaccaaacaggaggaattctatgcctga

SEQ ID NO: 819 - DNA, 1041 bp, Homo Sapiens
atggacatgctggacccgggtctggatcccgctgcctcggccaccgctgctgccgccgccagccacgacaagggacccgaggcggaggagggcgtcgagctgcaggaaggcggggacggcccaggagcggaggagcagacagcggtggccatcaccagcgtccagcaggcggcgttcggcgaccacaacatccagtaccagttccgcacagagacaaatggaggacaggtgacataccgcgtagtccaggtgactgatggtcagctggacggccagggcgacacagctggcgccgtcagcgtcgtgtccaccgctgccttcgcgggggggcagcaggctgtgacccaggtgggtgtggacggggcagcccagcgcccgggccccgccgctgcctctgtgcccccaggtcctgcagcgcccttcccgctggctgtgatccaaaatcccttcagcaatggtggcagtccggcggccgaggctgtcagcggggaggcacgatttgcctatttcccagcgtccagtgtgggagatactacggctgtgtccgtacagaccacagaccagagcttgcaggctggaggccagttctacgtcatgatgacgccccaggatgtgcttcagacaggaacacagaggacgatcgccccccggacacacccttactctccaaaaattgatggaaccagaacaccccgagatgagaggagaagagcccagcacaacgaagtggagcggaggcggagggacaagatcaacaactggatcgtccagctttcgaaaatcattccagactgtaacgcagacaacagcaagacgggagcgagtaaaggagggatcctgtccaaggcctgcgattacatccgggagttgcgccagaccaaccagcgcatgcaggagaccttcaaagaggccgagcggctgcagatggacaacgagctcctgaggcagcagatcgaggagctgaagaatgagaacgccctgcttcgagcccagctgcagcagcacaacctggagatggtgggcgagggcacccggcagtga

SEQ ID NO: 820 - DNA, 1437 bp, Homo Sapiens
atggcacccctgagaccccttctcatactggccctgctggcatgggttgctctggctgaccaagagtcatgcaagggccgctgcactgagggcttcaacgtggacaagaagtgccagtgtgacgagctctgctcttactaccagagctgctgcacagactatacggctgagtgcaagccccaagtgactcgcggggatgtgttcactatgccggaggatgagtacacggtctatgacgatggcgaggagaaaaacaatgccactgtccatgaacaggtggggggcccctccctgacctctgacctccaggcccagtccaaagggaatcctgagcagacacctgttctgaaacctgaggaagaggcccctgcgcctgaggtgggcgcctctaagcctgaggggatagactcaaggcctgagacccttcatccagggagacctcagcccccagcagaggaggagctgtgcagtgggaagcccttcgacgccttcaccgacctcaagaacggttccctctttgccttccgagggcagtactgctatgaactggacgaaaaggcagtgaggcctgggtaccccaagctcatccgagatgtctggggcatcgagggccccatcgatgccgccttcacccgcatcaactgtcaggggaagacctacctcttcaagggtagtcagtactggcgctttgaggatggtgtcctggaccctgattacccccgaaatatctctgacggcttcgatggcatcccggacaacgtggatgcagccttggccctccctgcccatagctacagtggccgggagcgggtctacttcttcaaggggaaacagtactgggagtaccagttccagcaccagcccagtcaggaggagtgtgaaggcagctccctgtcggctgtgtttgaacactttgccatgatgcagcgggacagctgggaggacatcttcgagcttctcttctggggcagaacctctgctggtaccagacagccccagttcattagccgggactggcacggtgtgccagggcaagtggacgcagccatggctggccgcatctacatctcaggcatggcaccccgcccctccttggccaagaaacaaaggtttaggcatcgcaaccgcaaaggctaccgttcacaacgaggccacagccgtggccgcaaccagaactcccgccggccatcccgcgccacgtggctgtccttgttctccagtgaggagagcaacttgggagccaacaactatgatgactacaggatggactggcttgtgcctgccacctgtgaacccatccagagtgtcttcttcttctctggagacaagtactaccgagtcaatcttcgcacacggcgagtggacactgtggaccctccctacccacgctccatcgctcagtactggctgggctgcccagctcctggccatctgtag

SEQ ID NO: 821 - DNA, 1944 bp, Homo Sapiens
atggctgaggaggaggcgcctaagaagtcccgggccgccggcggtggcgcgagctgggaactttgtgccggggcgctctcggcccggctggcggaggagggcagcggggacgccggtggccgccgccgcccgccagttgacccccggcgattggcgcgccagctgctgctgctgctttggctgctggaggctccgctgctgctgggggtccgggcccaggcggcgggccaggggccaggccaggggcccgggccggggcagcaaccgccgccgccgcctcagcagcaacagagcgggcagcagtacaacggcgagcggggcatctccgtcccggaccacggctattgccagcccatctccatcccgctgtgcacggacatcgcgtacaaccagaccatcatgcccaacctgctgggccacacgaaccaggaggacgcgggcctggaggtgcaccagttctaccctctagtgaaagtgcagtgttccgctgagctcaagttcttcctgtgctccatgtacgcgcccgtgtgcaccgtgctagagcaggcgctgccgccctgccgctccctgtgcgagcgcgcgcgccagggctgcgaggcgctcatgaacaagttcggcttccagtggccagacacgctcaagtgtgagaagttcccggtgcacggcgccggcgagctgtgcgtgggccagaacacgtccgacaagggcaccccgacgccctcgctgcttccagagttctggaccagcaaccctcagcacggcggcggagggcaccgtggcggcttcccggggggcgccggcgcgtcggagcgaggcaagttctcctgcccgcgcgccctcaaggtgccctcctacctcaactaccacttcctgggggagaaggactgcggcgcaccttgtgagccgaccaaggtgtatgggctcatgtacttcgggcccgaggagctgcgcttctcgcgcacctggattggcatttggtcagtgctgtgctgcgcctccacgctcttcacggtgcttacgtacctggtggacatgcggcgcttcagctacccggagcggcccatcatcttcttgtccggctgttacacggccgtggccgtggcctacatcgccggcttcctcctggaagaccgagtggtgtgtaatgacaagttcgccgaggacggggcacgcactgtggcgcagggcaccaagaaggagggctgcaccatcctcttcatgatgctctacttcttcagcatggccagctccatctggtgggtgatcctgtcgctcacctggttcctggcggctggcatgaagtggggccacgaggccatcgaagccaactcacagtattttcacctggccgcctgggctgtgccggccatcaagaccatcaccatcctggcgctgggccaggtggacggcgatgtgctgagcggagtgtgcttcgtggggcttaacaacgtggacgcgctgcgtggcttcgtgctggcgcccctcttcgtgtacctgtttatcggcacgtcctttctgctggccggctttgtgtcgctcttccgcatccgcaccatcatgaagcacgatggcaccaagaccgagaagctggagaagctcatggtgcgcattggcgtcttcagcgtgctgtacactgtgccagccaccatcgtcatcgcctgctacttctacgagcaggccttccgggaccagtgggaacgcagctgggtggcccagagctgcaagagctacgctatcccctgccctcacctccaggcgggcggaggcgccccgccgcacccgcccatgagcccggacttcacggtcttcatgattaagtaccttatgacgctgatcgtgggcatcacgtcgggcttctggatctggtccggcaagaccctcaactcctggaggaagttctacacgaggctcaccaacagcaaacaaggggagactacagtctga

SEQ ID NO: 822 - DNA, 1029 bp, Homo Sapiens
atggctgcggtggcgctgatgccaccgccgctgctgctgctgctgctgttggcgtcgccgcccgccgcctccgcgccgtccgcccgcgatcccttcgccccccagctcggggacacgcagaactgccagctgcggtgccgcgaccgcgacctcggcccgcagccctcgcaggcggggctggagggcgcctccgagtctccctatgacagagccgttctgatcagcgcttgcgagcgtggctgccgcctcttctccatctgccgatttgtggccagaagctccaagcccaatgccacccaaactgagtgtgaagcagcctgcgtggaagcctatgtgaaggaggcagagcagcaggcctgtagccacggctgctggagccagcccgcggagcctgagccggagcagaagagaaaggtcctggaggctccaagtggggccctctccctcttggacttgttttccaccctctgcaatgaccttgtcaactcagcccagggatttgtctcctccacctggacatactacttgcagactgacaatgggaaagtggtggtgtttcagactcagcccatagtggagagcctcggcttccaggggggccgtctgcagcgcgtggaggtgacctggcgaggctcccaccctgaagccctggaggtgcacgtggaccctgtaggccccctggacaaggtgaggaaggccaagatccgagtcaagaccagcagcaaggccaaggtggagtctgaagagccacaggacaatgacttcctcagttgcatgtcccggcgctcgggtctgcctcgctggatcctggcctgctgcctcttcctctccgtgctggtgatgctgtggctgagctgctccaccctggtgaccgcgcctggccagcacctcaagttccagcctctgaccctggagcagcacaagggcttcatgatggagcccgattggcccctgtacccgccgccgtcccacgcctgtgaggacagcctaccaccctacaagctgaagctggacctgaccaagctgtag

SEQ ID NO: 823 - DNA, 1065 bp, Homo Sapiens
atggctacgcccctggtggcgggtcccgcagctctacgcttcgccgccgcggctagctggcaggttgtgcgcggacgctgcgtggaacattttccgcgagtactggagtttctgcgatctctgcgcgctgttgcccctggcttggttcgctaccggcaccacgaacgcctttgtatgggcctaaaggccaaggtggtggtggagctgatcctgcagggccggccttgggcccaagtcctgaaagccctgaatcaccactttccagaatctggacctatagtgcgggatcccaaggctacaaagcaggatctgaggaagattttggaggcacaggaaactttttaccagcaggtgaagcagctgtcagaggctcctgtggatttggcctcgaagctgcaggaacttgaacaagagtatggggaaccctttctggctgccatggaaaagctgctttttgagtacttgtgtcagctggagaaagcactgcctacaccgcaggcacagcagcttcaggatgtgctgagttggatgcagcctggagtctctatcacctcttctcttgcctggagacaatatggtgtggacatggggtggctgcttccagagtgctctgttactgactcagtgaacctggctgagcccatggaacagaatcctcctcagcaacaaagactagcactccacaatcccctgccaaaagccaagcctggcacacatcttcctcagggaccatcttcaaggacgcacccagaacctctagctggccgacacttcaatctggcccctctaggccgacgaagagttcagtcccaatgggcctccactaggggaggccataaggagcgccccacagtcatgctgtttccctttaggaatctcggctcaccaacccaggtcatatctaagcctgagagcaaggaagaacatgcgatatacacagcagacctagccatgggcacaagagcagcctccactgggaagtctaagagtccatgccagaccctggggggaagggctctgaaggagaacccagttgacttgcctgccacagagcaaaaggagtga

SEQ ID NO: 824 - DNA, 1683 bp, Homo Sapiens
atggagttccgccaggaggagtttcggaagctagcgggtcgtgctctcgggaagctgcaccgccttctggagaagcggcaggaaggcgcggagacgctggagctgagtgcggatgggcgcccggtgaccacgcagacccgggacccgccggtggtggactgcacctgcttcggcctccctcgccgctacattatcgccatcatgagtggtctgggcttctgcatcagctttggcatccgctgcaacctgggcgtggccatcgtctccatggtcaataacagcacgacccaccgcgggggccacgtggtggtgcagaaagcccagttcagctgggatccagagactgtcggcctcatacacggctcctttttctggggctacattgtcactcagattccaggaggatttatctgtcaaaaatttgcagccaacagagttttcggctttgctattgtggcaacatccactctaaacatgctgatcccctcagctgcccgcgtccactatggctgtgtcatcttcgtgaggatcctgcaggggttggtagagggggtcacataccccgcctgccatgggatctggagcaaatgggccccacccttagaacggagtcgcctggcgacgacagccttttgtggttcctatgctggggcggtggtcgcgatgcccctcgccggggtccttgtgcagtactcaggatggagctctgttttctacgtctacggcagcttcgggatcttctggtacctgttctggctgctcgtctcctacgagtcccccgcgctgcaccccagcatctcggaggaggagcgcaagtacatcgaggacgccatcggagagagcgcgaaactcatgaaccccctcacgaagtttagcactccctggcggcgcttcttcacgtctatgccagtctatgccatcatcgtggccaacttctgccgcagctggacgttctacctgctgctcatctcccagcccgcctacttcgaagaagtgttcggcttcgagatcagcaaggtaggcctggtgtccgcgctgccccacctggtcatgaccatcatcgtgcccatcggcggccagatcgcggacttcctgcggagccgccgcatcatgtccaccaccaacgtgcgcaagttgatgaactgcggaggcttcggcatggaagccacgctgctgttggtggtcggctactcgcactccaagggcgtggccatctccttcctggtcctagccgtgggcttcagcggcttcgccatctctgggttcaacgtgaaccacctggacatagccccgcgctacgccagcatcctcatgggcatctccaacggcgtgggcacactgtcgggcatggtgtgccccatcatcgtgggggccatgactaagcacaagactcgggaggagtggcagtacgtgttcctaattgcctccctggtgcactatggaggtgtcatcttctacggggtctttgcttctggagagaagcagccgtgggcagagcctgaggagatgagcgaggagaagtgtggcttcgttggccatgaccagctggctggcagtgacgacagcgaaatggaggatgaggctgagcccccgggggcaccccctgcacccccgccctcctatggggccacacacagcacatttcagccccccaggcccccaccccctgtccgggactactga

SEQ ID NO: 825 - DNA, 14946 bp, Homo Sapiens
atggacttagcaccagacagggctactggccgcccgtggctcccgttgcacactctatcagtatctcagctccttcgagtgttttggctactgtcattgcttccggggcaggcctgggtccacggggccgagccgcgccaggtgttccaagtgctggaagagcaacctccaggcactctggtaggcaccatccagacgcgccccggcttcacctacaggctcagcgaaagccacgccctgtttgccataaacagtagcaccggagccctgtacaccacctccaccatcgaccgcgagagcctgcccagcgacgtgatcaacctggtggtcctttccagcgcgcccacctaccccaccgaagtgcgagtgctggtgcgggacctcaatgacaacgcccccgttttcccggacccctctatcgtggtcactttcaaggaagacagtagcagcggacgccaagtcatcttagacaccgccaccgactcggacatcggctcaaacggtgtggaccaccgctcctaccgcatcatccgcggcaatgaggcggggcgcttccgtctggacatcaccctgaacccgagcggcgagggagcgttcctgcatctggtgtccaagggcggactggaccgtgaggtcactccgcagtaccagctcctggttgaggtggaggacaagggtgagcctaagcggcggggctaccttcaggtaaacgtgactgtgcaagacattaatgacaaccccccggtttttggcagttctcactaccaggcgggggtgcctgaggacgcggttgtgggttccagcgtcctccaggtggcggcggcggacgcggacgagggcaccaacgcggacatccgctatcgcctgcaggacgaggggacccccttccaaatggaccctgagacgggacttatcacggtgcgggagcccctggacttcgaagctcggcgccaatactcgcttacggtgcaggcgatggacagaggcgtgccttccctcactgggcgcgccgaggcgctgattcagctgctggacgtgaatgacaatgacccggtagtgaagttccgctacttcccggccacctcgcgctacgcctcggtagatgagaatgctcaagtgggcaccgtggtggctctgctcaccgtgacggacgcagattctcccgcggccaacgggaacatctccgtgcaaattctcgggggcaatgagcagcgccactttgaagtgcaaagcagcaaagtgccgaacctgagcctaatcaaggtggccagcgccttggaccgcgagcgcatcccttcctacaacctcacagtttccgtctctgataactacggggcgccccctggcgcagcagtccaggcgcgctcttctgtggcaagcctggtgatttttgttaatgacatcaatgaccatcctcctgtcttttcacagcaagtgtacagagtgaacctgagcgaggaggcgcctccgggaagctatgtgagtgggatatctgccactgatggcgactctggtctcaatgctaatctgcgttacagcattgtctctggcaatggactgggatggttccatatcagtgaacatagcggcctcgtgaccactgggtcctctgggggcctggaccgtgaacttgcttcccagattgttctgaatataagtgcccgggaccagggagttcaccccaaggtgtcctatgcccagcttgtagtaactctcctagatgtgaatgatgaaaagccagtatttagccagccagaagggtatgatgtgtctgtggttgagaatgccccaacagggacagaactgttgatgctcagggcaactgacggggacctgggtgacaacggaacagtgcgcttctccttacaagaggcagagactgaccggaggtccttccgtctggatcctgtgtctgggaggttgagtactatttcctccttggacagagaagagcaagccttctactccctgttggttctggccacagatctgggctcccctccccagtcatcaatggctcgcataaatgtgagtcttctggatataaatgataacagccctgtcttctacccggtccaatactttgctcacattaaggagaatgagcctggaggtagctacatcaccactgtgtctgccactgacccagacttgggtaccaatggtactgtcaaatatagcatatctgctggggacaggtctcggtttcaggtcaatgctcagagtggggttatttctacaagaatggccctagacagagaagaaaaaacagcttatcagttgcaaatagtagctactgatggtggcaatttacaatctcccaaccaggcaatagtaaccatcactgtattggacactcaagacaacccacctgtattcagtcaggttgcctacagctttgtggtttttgagaacgtggcgctgggatatcatgtgggtagtgtgtctgcatccaccatggatctcaattccaacatcagttatctcattactactggggatcagaaaggtatgtttgctatcaaccaggtcactgggcagcttaccacagcaaatgtgattgatagagaagagcaatccttttatcagctgaaggtagtggccagtgggggcacagtgactggagacactatggttaacataacagttaaggatttgaatgacaactctccccatttccttcaggcaatagagagtgtaaatgtggtggagaattggcaggcaggtcacagcattttccaggccaaagctgtggaccctgatgaaggtgtcaatggcatggtactctatagtctgaagcaaaaccccaagaacctgtttgctatcaatgaaaagaatggcactattagtctgcttgggcccctggatgttcatgctggctcctaccaaatagagatcttggcatctgacatgggtgtcccacagctctcctctagtgtcatcttaacagtttatgtccatgatgtaaatgacaattcaccagtgtttgaccaactctcttatgaagtcaccctttctgagtcagaacctgtgaattctcgattctttaaagtacaagcttctgataaggattcaggagcaaatggtgaaattgcatacaccattgctgaaggaaatacaggggatgcttttggcatattcccagatggtcaattgtatataaaaagtgaactggaccgtgaacttcaagacagatatgttttaatggttgttgcttctgacagagcagtggaaccccttagtgctactgtgaatgttactgtaattttagaagatgtaaatgataacagacctctttttaacagtaccaattacacattttacttcgaagaagagcagagggctgggtcgtttgtgggcaaagtaagtgctgtagataaagactttgggccaaatggagaagtaaggtattcttttgaaatggtgcagccagattttgagttgcatgccatcagtggggaaattacaaatactcatcagtttgacagggagtctcttatgaggcggagagggactgctgtgtttagctttacagtcatagcaacagatcaggggatccctcagcctctcaaggatcaggccactgtacatgtttacatgaaggatataaatgataatgctcccaaatttttaaaagacttttaccaagctacaatatcagaatcagcagccaatctgacacaagtgttaagagtatctgcctcagatgttgatgaaggtaataatggacttattcactattctataataaaaggaaatgaagaaagacagtttgctatagacagtacctctggtcaggtaacactaattggcaaattagactatgaagcaacacctgcctattcccttgtaattcaagcagtggattcagggacaatccccctcaattcaacgtgtactttaaatattgatattttagatgaaaatgacaataccccttctttccctaaatcaacactctttgttgatgttttggaaaacatgagaattggtgaactcgtgtcctctgttactgcaactgattccgattcaggtgacaatgctgatttatattacagtattactgggactaacaaccacggaacttttagcattagcccaaacactgggagtatttttcttgccaaaaaactggactttgaaacacagtctttgtataaattaaatataacagcaaaagaccaaggaagacctcctcgttcatctacaatgtcagtggttattcacgtgagggactttaatgacaatcctcctagctttcctcctggagatattttcaagtctattgttgagaacattcccatcggtacatctgtcatttcagtgactgcacatgaccctgatgcagacattaatggtcaactatcctacacaatcattcaacagatgccaagaggcaaccactttaccatagatgaagtcaaagggactatatatactaatgctgaaatagatcgggaatttgctaatctctttgagttgactgtaaaagccaatgatcaagctgtgccaatagaaactagacggtatgctttgaagaacgtgaccattttggttacagacctcaatgacaatgtcccaatgtttatatcacaaaacgcccttgctgcagacccatcagctgtgattggttccgttctgacaacaattatggctgctgacccagatgaaggtgctaatggagaaatagagtatgagatcatcaatggggacacagacaccttcattgttgatcgttatagtggagacctgagagtggcttcagcgttggtgccttcacagttgatctacaatctcatagtttcagcaacagaccttgggcctgaaaggaggaaatcgaccactgaattgaccatcattcttcagggccttgatggacctgtttttactcaacccaaatatataactattttgaaggaaggagaacccattggcacaaacgtgatatcaatagaagcagctagccccagaggatctgaggccccagtggagtattatattgtttcagttcgttgtgaagaaaaaactgttggacgcctctttactattggacgacatactggtataattcagaccgcagccattctggaccgggagcaaggagcatgtctttacctggtggatgtttatgccatagaaaaatcaactgcttttcccagaacacagagagcagaggtagaaataacacttcaggatatcaatgacaatccaccagtatttccaacggacatgctggatctcacggtagaggagaacattggagatggctctaagattatgcagctgacagccatggatgctgatgagggtgcaaatgctctcgtcacatacactatcattagtggagctgatgatagttttcgcatcgacccagaatccggagatctgatagcaaccaggcggttggacagggaacgccgctccaaatattcactgctagttcgtgctgatgatggtcttcagtcctcggatatgagaattaatatcactgtcagtgatgtgaatgaccatacacccaaattttccagacccgtgtactcttttgacattcctgaggacacaatccctggttctttggtagcagccattttagccacggatgatgactctggtgtgaatggagaaattacatatattgtgaatgaagatgatgaagatggcatctttttcctgaatcctattactggggtctttaatttgactcgattattagattatgaagtacagcaatattatatcctcactgttcgagcagaagatggtgggggacaatttactaccatcagagtttatttcaatattctagatgtaaatgataatccacctattttcagcttgaattcatacagcacatctttaatggagaatctacctgtgggatctactgttcttgtgtttaatgttactgatgcagatgatggcatcaactctcaattgacttatagcattgcttcaggtgatagccttgggcagtttactgttgacaagaatggtgtactcaaagtcctaaaagctttggatcgggaaagtcagtccttctacaacttggttgttcaagtgcatgacctgccacagattccagcctccagattcacaagcactgctcaagtctccattattttgttggatgtaaatgataacccaccgacatttctttcccctaaattgacatacattccagaaaatacacctattgatactgttgttttcaaagctcaagcaactgacccagatagtggcccaaacagctatattgagtacactctgctgaaccctttgggaaacaagttcagtattgggaccattgatggtgaagtgaggctcactggagaactggacagagaagaagtttctaattatactctaacagtggtggctacagacaaaggtcaaccatctctctcttcatctacagaggttgtagttatggtacttgacatcaatgataacaaccccatctttgcacaagctttgtataaagtggagattaatgaaaacacacttactggaacagatataatacaagtgttcgcagcagatggagatgaaggcacaaatggacaggttcgctatggcattgttaatggtaataccaatcaggaatttcggatagactctgtcacaggtgccatcactgtcgctaaacctttggatagagaaaagacccctacctaccatttaactgttcaggcaacagatcgaggcagcacacccagaactgatacctccacggtcagcattgttctactggatattaatgactttgttcctgtatttgagctatctccatattctgtaaatgtccctgagaatttagggacactacccagaacaattcttcaggtggtggcaagagatgatgatcgaggatctaacagcaaactctcatatgttctgtttggtggtaatgaagacaatgcttttactctctcagccagtggagaacttggagtaacacagagtctggatcgggaaacaaaagagcgctttgtcttaatgattacagctacagattcaggatcccctgccttgactggaactggaacaatcaacgtcatagtagatgatgtcaatgacaatgtccccacatttgccagtaaagcgtatttcacaacaattcctgaggatgcaccaactggaacagatgttttattggtaaatgcctcagatgctgatgcttcaaagaatgcagttataaggatcatcggtggaaactctcagttcacgatcaacccatcgacaggacaaatcatcaccagcgcattgttagatagggaaacaaaagataattatactttggtagtggtctgcagtgatgcgggatccccagagcctctttccagttccaccagtgtgcttgtcactgtgactgatgtcaatgacaatccaccaagatttcagcatcacccatatgtcactcacatcccatctcctactcttccaggttcctttgtctttgcggttacagtcacagatgctgatattggaccaaattctgaactgcattattctctttcgggtagaaattctgaaaaatttcacattgacccactgaggggagccattatggccgccggaccactaaacggagcttcagaagtgacattttctgtgcatgtaaaagatggtggctcatttccaaagacagattctacaacagtgactgttagattcgtgaataaggccgatttccctaaagtgagagccaaagaacaaacgttcatgtttcctgaaaaccaaccagtcagctctcttgtcaccaccatcacaggatcctctttaagaggagaacctatgtcatattatatcgcaagtgggaatcttggcaatactttccagattgatcagttaacagggcaggtgtctattagtcaacctctggattttgaaaagatacaaaaatatgttgtatggatagaggccagagacggtggtttccctcctttctcctcttacgagaaacttgatataacagtattagatgtcaatgataatgccccaatttttaaggaagacccatttatatctgaaatattggaaaacctttcccctcgaaaaatacttactgtttcggcaatggacaaggacagtggacccaatggacagttagattatgaaattgttaatggcaacatggaaaatagtttcagtatcaatcatgctactggtgaaattagaagcgttagacctttggacagggaaaaagtatctcattatgtcctaaccataaaatcatcagacaaagggtccccgtctcagagtacttcagtaaaagtcatgattaacattttagatgaaaatgataatgcccctaggttttctcagatatttagtgcccatgttcctgaaaattcccccttaggatacacagttacccgtgtcacaacttctgatgaagacattgggatcaatgcaattagtagatattctataatggatgcaagtcttccatttacaattaatcccagcacaggggatattgtcataagcagacctttaaatagggaagatacagaccgttacagaattcgagtttccgcacatgattctgggtggactgtaagtacagatgtcacaatatttgtgacagacatcaatgacaatgctccaagatttagcagaacttcctattatttagattgccctgaacttactgagattggctccaaagtaactcaggtatttgcaacagatcctgatgagggatcaaatggacaagtgttttatttcataaaatcccaatcagaatatttcaggattaatgccaccactggagagattttcaataaacagatcttaaaataccaaaatgtcactggcttcagtaatgtgaatatcaacaggcatagttttatagtgacatcttcagatcgaggtaaaccttccttaattagtgagacaacagttaccatcaatatagtggacagtaatgacaatgcacctcaatttcttaaaagtaaatatttcactccagtcaccaaaaatgttaaggttggtacgaagttaatcagagttacagcaatagatgacaaagattttggactgaattcagaagtggagtatttcatttctaatgataaccatttaggaaaatttaagttggacaatgatacggggtggatttcagtagcatcctccctgatttctgacttgaaccaaaacttttttatcacagtcactgcaaaggataagggaaaccctccactttcttcccaagcaactgttcacataactgtcactgaggaaaactaccatacacctgaattctctcaaagccacatgagtgcaaccatccctgagagccatagcattgggtccattgtcagaactgtttctgcaagagatagagatgcagcgatgaatggcttgattaagtacagcatttcttcaggaaatgaagaaggcatttttgcaatcaattcttctacaggtatattaacactagccaaagctcttgattatgagctatgccagaaacacgaaatgacgattagtgctatagatggaggatgggttgcaagaactggttactgcagtgtgaccgtaaatgtgattgatgtgaatgataattctccagtattcctctctgatgactatttccctactgttttggaaaatgccccaagtggaacaacagttatccacctaaatgcaacagatgctgactctggaacaaatgctgtgattgcgtatactgtacagtcatctgacagtgacctctttgtcattgaccctaacacaggagtcataaccactcaaggcttcttggattttgaaaccaagcagagctaccatcttactgtgaaagccttcaatgtccccgatgaggaaaggtgtagctttgccactgttaatatacaattaaaagggacaaatgaatatgtgccccgttttgtttccaaactttactattttgaaatctcagaagcagctcctaaaggtactattgttggagaagtgtttgctagcgaccgtgatttgggcactgatggggaggtacactatttgatttttggtaatagtcgaaagaagggtttccagatcaataagaagactggacagatttatgtttctggaattcttgatcgagaaaaagaagaaagggtgtctttgaaggtattggccaagaactttggcagcattagaggtgcagatatagatgaggtcactgtaaatgtcaccgtgcttgatgcaaatgacccacccatttttactctaaacatctacagtgtgcagatcagtgaaggggtcccaataggaactcatgtgacctttgtcagtgcctttgactcagactccatccccagctggagcaggttttcttacttcatcggatcagggaatgaaaatggtgccttttctattaatccgcagacaggacagatcaccgttactgcagaattagatcgagaaacccttcccatctataatctctcagttttggctgttgattcagggaccccctcagctacaggtagtgcctctttattagtcaccctggaagatataaatgataacgggcccatgctgactgtcagtgaaggagaagtcatggaaaacaaacggccaggcactttggtgatgacccttcagtccactgaccctgatctccctccaaatcaaggtccctttacttattacttgctgagcacaggtcctgccaccagttatttcagtctgagcactgctggagttctgagcacaaccagagagattgacagagagcagattgcagacttctatctgtctgtggttaccaaggattctggtgttcctcaaatgtcttccacaggaactgtgcatatcacagttatagaccaaaatgacaatccttcacagtctcggacggtggagatatttgttaattattatggtaacttgtttcccggtgggattttaggctctgtgaagccacaggatccagatgtgttagacagcttccactgctcccttacttcaggagttaccagcctcttcagtattccagggggtacttgtgatctgaattcccagccaaggtccacagatggcacgtttgatctgactgtccttagcaatgatggagttcacagcacagtcacgagcaacatccgagttttctttgctggattttccaatgccacagtggataacagcatcttacttcgtctcggcgtaccaacagtaaaggacttcttgaccaaccactatcttcattttttacgcattgccagctcacagctgacaggcttagggactgctgtgcaactgtacagtgcatatgaagagaacaatagaacgtttcttttggcagctgtgaagcgaaatcataatcagtatgtgaatcccagtggcgtagccaccttctttgaaagcatcaaagagatccttctccggcagagtggagtaaaggtggaatctgtggatcatgactcctgtgtgcatggcccatgtcagaatggagggagctgtctacgaagattggctgtgagctccgtattaaaaagccgtgagagtcttccagtcatcatcgtggcaaatgaacctctgcagcctttcttatgcaagtgtctgccaggatatgcgggtagctggtgtgaaatagatatagatgaatgtcttccatcaccttgccacagtggtggaacctgtcacaatttagtgggaggattttcatgcagctgcccagatggcttcactggtagggcgtgtgagagagatatcaatgagtgcctgcagagtccttgcaagaatggtgccatctgccagaattttccaggaagcttcaactgtgtttgcaaaactggatacacagggaaaatgtgtgaatcttcagtcaattactgtgaatgcaacccctgctttaatggtggttcctgccaaagtggtgtggattcttattattgtcattgtccatttggtgtctttggaaaacactgcgagttgaacagttatggatttgaggagttatcatacatggaatttccaagcttggaccccaataacaactatatttatgtcaaatttgccacgattaaaagtcatgccttattgctttacaactatgacaaccagacaggcgaccgggctgagtttttggcccttgaaattgccgaagaaagactaagattctcttataatttaggcagtggtacatataagctcaccaccatgaagaaggtgtcagatggacattttcacactgtgattgccaggagagcaggaatggcagcctccttaactgtggactcctgttctgagaaccaagagccaggatattgtactgtcagtaatgtggcagtttcagatgactggactcttgatgttcagccaaatagagttacagttggaggtatcagatctctagaaccaatccttcagagaagaggacacgtggaaagccatgattttgttgggtgtataatggagtttgcagtcaatggaaggcctctggaacccagccaagctttggcagcacaaggcatcctagatcaatgccctaggctggaaggcgcttgtactcgcagcccatgccaacatggtggcacatgtatggattactggtcatggcagcagtgtcattgcaaagagggactcactgggaaatactgtgaaaaatctgttactcctgacactgccttatcattagaaggcaaagggcgcttggactaccacatgagtcagaatgagaagcgggaatatttgttaaggcaaagcttacgaggtgccatgttggagccttttggtgtgaacagtctggaagtaaaatttaggaccagaagcgagaatggcgttttaatccatatccaagaaagcagcaattacactactgtgaagattaagaatggcaaagtatattttacatccgatgcaggaattgctgggaaagtggagagaaatattcctgaagtatatgttgcagacggccactggcacacttttctaattgggaaaaatggaacagcaacagtattgtctgttgacagaatatataacagagatattatccaccctactcaggacttcggtggccttgatgtgcttactatatcacttggaggaattccacccaatcaagcacatcgagatgcccaaacagcaggttttgatggctgcattgcttctatgtggtatggtggagaaagtcttcctttcagcgggaagcatagcttggcctccatctcaaaaacagatccctcagtgaagattggctgccgtggcccgaacatttgtgccagcaacccctgctggggtgatttgctgtgcattaatcagtggtatgcctacaggtgtgtccctcctggggactgtgcctcccacccgtgccagaatggtggcagctgtgagccaggcctgcactccggcttcacctgtagctgcccagactcgcacacgggaaggacctgtgagatggtggtggcctgtcttggcgtcctctgtcctcaggggaaggtgtgcaaagctggaagtcctgcggggcatgtctgtgttctgagtcagggccctgaagagatctctctgcctttgtgggctgtgcctgccatcgtgggcagctgcgcaaccgtcttggccctcctggtccttagcctgatcctgtgtaaccagtgcagggggaagaaggccaaaaatcccaaagaggagaagaaaccgaaggagaagaagaaaaagggaagtgagaacgttgcttttgatgaccctgacaatatccctccctatggggatgacatgactgtgaggaagcagcctgaagggaacccaaaaccagatatcattgaaagggaaaacccctaccttatctatgatgaaactgatattcctcacaactcagaaaccatccccagcgcccctttggcatctccagagcaggagatagagcactatgacattgacaacgccagcagcatcgccccttcggatgcagacatcattcaacactacaagcagttccgcagccacacaccaaaattttcaatccagaggcacagtcccctaggctttgcaaggcaatcccccatgcccttaggagcaagcagtttgacttaccagccttcatatggtcaaggtttgagaaccagctccctaagccactcagcatgcccaactcccaaccctctgtctcgacacagtccagcccctttctccaaatcttctacgttctatagaaacagcccagcaagggaattgcatcttcctataagggatggtaatactttggaaatgcatggtgacacctgccaacctggcattttcaactatgccacaaggctgggaaggagaagcaagagtcctcaggccatggcatcacatggttctagaccagggagtcgcctaaagcagccgattgggcagattccactggaatcttctcctccagtcggactttctattgaagaagtggagaggctcaacacacctcgccctagaaacccaagtatctgcagtgcagaccatgggaggtcttcttcagaggaggactgcagaaggccactgtctagaacaaggaatccagcggatggcattccagctccagaatcctcttctgatagtgactcccatgaatctttcacttgctcagaaatggaatatgacagggagaagccaatggtatatacttccagaatgcccaaattatctcaagtcaatgaatctgatgcagatgatgaagataattatggagccagactgaagcctcgaaggtaccacggtcgcagggccgagggaggacctgtgggcacccaggcagcagcaccaggcactgctgacaacacactgcccatgaagctagggcagcaagcagggactttcaactgggacaaccttttgaactggggccctggctttggccattatgtagatgtttttaaagatttggcatctcttccagaaaaagcagcagcaaatgaagaaggcaaagctgggacaactaaaccagtccccaaagatggggaagcagaacagtatgtgtga

SEQ ID NO: 826 - DNA, 1026 bp, Homo Sapiens
atgctcagaagccccaccttcacagacgctggccccagatgtagctgccttcctgtgtcacagactctcgattccatggacacagtcctcatgggctccctccagcactgctgttgcctgctgcctaagatgggtgacacttgggcccagcttccctggcccgggccaccccacccagcaatgctgctgatctccctcctcttggcagccgggttgatgcactcggatgccggcaccagctgccccgtcctttgcacatgccgtaaccaggtggtggattgtagcagccagcggctattctccgtgcccccagacctgccaatggacacccgaaacctcagcctggcccacaaccgcatcacagcagtgccgcctggctacctcacatgctacatggagctccaggtgctggatttgcacaacaactccttaatggagctgccccggggcctcttcctccatgccaagcgcttggcacacttggacctgagctacaacaatttcagccatgtgccagccgacatgttccaggaggcccatgggctagtccacatcgacctgagccacaacccctggctgcggagggtgcatccccaggcctttcagggcctcatgcagctccgagacctggacctcagttatgggggcctggccttcctcagcctggaggctcttgagggcctaccggggctggtgaccctgcagatcggtggcaatccctgggtgtgtggctgcaccatggaacccctgctgaagtggctgcgaaaccggatccagcgctgtacagcagattctcagctggctgagtgccggggccctcctgaagtcgagggcgccccgctcttctcactcactgaggagagcttcaaggcctgccacctgaccctgaccctggatgattacctattcattgcgttcgtgggcttcgtggtctccattgcttctgtggccaccaacttcctcctgggcatcactgccaactgctgccaccgctggagcaaggccagtgaagaggaagagatctga

SEQ ID NO: 827 - DNA, 879 bp, Homo Sapiens
atgggctggcatgacgcggaggatgctggcgccccgctggtgtacgccctgctgctgcagcgctgtcgccagggccactgcgaggagttctgtgtctacaagggcagcctctccggctacggagccgtgctgcccccgggtttcaggccacacttcgaggtgggcctggccgtggtggtgcaggaccagctgggagccgctgtggtcgccctcaacaggtctctggccatcaccctcccagagcccaacggcagcgcaatggggctcacagtctggctgcacgggctcaccgctagtgtgctcccagggctgctgcggcaggccgatccccagcacgtcatcgagtactcgctggccctggtcactgtgctgaacgagtacgagcgggccctggacgtggcggcagagcccaagcacgagcggcagcgccgagcccagatacgcaagaacatcacggagactctggtgtccctgagggtccacactgtggatgacatccagcagatcgctgctgcgctggcccagtgcatggggcccagcagggagctcgtatgccgctcgtgcctgaagcagacgctgcacaagctggaggccatgatgcgcatcctgcaggcagagaccaccgcgggcaccgtgacgcccaccgccatcggagacagcatcctcaacatcacaggagacctcatccacctggccagctcagacgtgcgggcaccacagcgctcagagctgggagccgagtcaccatcgcggatggtggcgtcccaggcctacaacctgacctctgccctcacgcccatcctcacgcgctcccgcgtgctcaacgaggagcccctgacgctggcgggctttcagcagggccccggccaacctcagtga

SEQ ID NO: 828 - DNA, 1257 bp, Homo Sapiens
atgcgctccctcctgcttctcagcgccttctgcctcctggaggcggccctggccgccgaggtgaagaaacctgcagccgcagcagctcctggcactgcggagaagttgagccccaaggcggccacgcttgccgagcgcagcgccggcctggccttcagcttgtaccaggccatggccaaggaccaggcagtggagaacatcctggtgtcacccgtggtggtggcctcgtcgctagggctcgtgtcgctgggcggcaaggcgaccacggcgtcgcaggccaaggcagtgctgagcgccgagcagctgcgcgacgaggaggtgcacgccggcctgggcgagctgctgcgctcactcagcaactccacggcgcgcaacgtgacctggaagctgggcagccgactgtacggacccagctcagtgagcttcgctgatgacttcgtgcgcagcagcaagcagcactacaactgcgagcactccaagatcaacttccgcgacaagcgcagcgcgctgcagtccatcaacgagtgggccgcgcagaccaccgacggcaagctgcccgaggtcaccaaggacgtggagcgcacggacggcgccctgctagtcaacgccatgttcttcaagccacactgggatgagaaattccaccacaagatggtggacaaccgtggcttcatggtgactcggtcctataccgtgggtgtcatgatgatgcaccggacaggcctctacaactactacgacgacgagaaggaaaagctgcaaatcgtggagatgcccctggcccacaagctctccagcctcatcatcctcatgccccatcacgtggagcctctcgagcgccttgaaaagctgctaaccaaagagcagctgaagatctggatggggaagatgcagaagaaggctgttgccatctccttgcccaagggtgtggtggaggtgacccatgacctgcagaaacacctggctgggctgggcctgactgaggccattgacaagaacaaggccgacttgtcacgcatgtcaggcaagaaggacctgtacctggccagcgtgttccacgccaccgcctttgagttggacacagatggcaacccctttgaccaggacatctacgggcgcgaggagctgcgcagccccaagctgttctacgccgaccaccccttcatcttcctagtgcgggacacccaaagcggctccctgctattcattgggcgcctggtccggcctaagggtgacaagatgcgagacgagttatag

SEQ ID NO: 829 - DNA, 1437 bp, Homo Sapiens
atgggccgatgctgcttctacacggcggggacgttgtccctgctcctgctggtgaccagcgtcacgctgctggtggcccgggtcttccagaaggctgtagaccagagtatcgagaagaaaattgtgttaaggaatggtactgaggcatttgactcctgggagaagccccctctgcctgtgtatactcagttctatttcttcaatgtcaccaatccagaggagatcctcagaggggagacccctcgggtggaagaagtggggccatacacctacagggaactcagaaacaaagcaaatattcaatttggagataatggaacaacaatatctgctgttagcaacaaggcctatgtttttgaacgagaccaatctgttggagaccctaaaattgacttaattagaacattaaatattcctgtattgactgtcatagagtggtcccaggtgcacttcctcagggagatcatcgaggccatgttgaaagcctatcagcagaagctctttgtgactcacacagttgacgaattgctctggggctacaaagatgaaatcttgtcccttatccatgttttcaggcccgatatctctccctattttggcctattctatgagaaaaatgggactaatgatggagactatgtttttctaactggagaagacagttaccttaactttacaaaaattgtggaatggaatgggaaaacgtcacttgactggtggataacagacaagtgcaatatgattaatggaacagatggagattcttttcacccactaataaccaaagatgaggtcctttatgtcttcccatctgacttttgcaggtcagtgtatattactttcagtgactatgagagtgtacagggactgcctgcctttcggtataaagttcctgcagaaatattagccaatacgtcagacaatgccggcttctgtatacctgagggaaactgcctgggctcaggagttctgaatgtcagcatctgcaagaatggtgcacccatcattatgtctttcccacacttttaccaagcagatgagaggtttgtttctgccatagaaggcatgcacccaaatcaggaagaccatgagacatttgtggacattaatcctttgactggaataatcctaaaagcagccaagaggttccaaatcaacatttatgtcaaaaaattagatgactttgttgaaacgggagacattagaaccatggttttcccagtgatgtacctcaatgagagtgttcacattgataaagagacggcgagtcgactgaagtctatgattaacactactttgatcatcaccaacataccctacatcatcatggcgctgggtgtgttctttggtttggtttttacctggcttgcatgcaaaggacagggatccatggatgagggaacagcggatgaaagagcacccctcattcgaacctaa

SEQ ID NO: 830 - DNA, 1677 bp, Homo Sapiens
atggccgctctcacccgggacccccagttccagaagctgcagcaatggtaccgcgagcaccgctccgagctgaacctgcgccgcctcttcgatgccaacaaggaccgcttcaaccacttcagcttgaccctcaacaccaaccatgggcatatcctggtggattactccaagaacctggtgacggaggacgtgatgcggatgctggtggacttggccaagtccaggggcgtggaggccgcccgggagcggatgttcaatggtgagaagatcaactacaccgagggtcgagccgtgctgcacgtggctctgcggaaccggtcaaacacacccatcctggtagacggcaaggatgtgatgccagaggtcaacaaggttctggacaagatgaagtctttctgccagcgtgtccggagcggtgactggaaggggtacacaggcaagaccatcacggacgtcatcaacattggcattggcggctccgacctgggacccctcatggtgactgaagcccttaagccatactcttcaggaggtccccgcgtctggtatgtctccaacattgatggaactcacattgccaaaaccctggcccagctgaaccccgagtcctccctgttcatcattgcctccaagacctttactacccaggagaccatcacgaatgcagagacggcgaaggagtggtttctccaggcggccaaggatccttctgcagtggcgaagcactttgttgccctgtctactaacacaaccaaagtgaaggagtttggaattgaccctcaaaacatgttcgagttctgggattgggtgggaggacgctactcgctgtggtcggccatcggactctccattgccctgcacgtgggttttgacaacttcgagcagctgctctcgggggctcactggatggaccagcacttccgcacgacgcccctggagaagaacgcccccgtcttgctggccctgctgggtatctggtacatcaactgctttgggtgtgagacacacgccatgctgccctatgaccagtacctgcaccgctttgctgcgtacttccagcagggcgacatggagtccaatgggaaatacatcaccaaatctggaacccgtgtggaccaccagacaggccccattgtgtggggggagccagggaccaatggccagcatgctttttaccagctcatccaccaaggcaccaagatgataccctgtgacttcctcatcccggtccagacccagcaccccatacggaagggtctgcatcacaagatcctcctggccaacttcttggcccagacagaggccctgatgaggggaaaatcgacggaggaggcccgaaaggagctccaggctgcgggcaagagtccagaggaccttgagaggctgctgccacataaggtctttgaaggaaatcgcccaaccaactctattgtgttcaccaagctcacaccattcatgcttggagccttggtcgccatgtatgagcacaagatcttcgttcagggcatcatctgggacatcaacagctttgaccagtggggagtggagctgggaaagcagctggctaagaaaatagagcctgagcttgatggcagtgctcaagtgacctctcacgacgcttctaccaatgggctcatcaacttcatcaagcagcagcgcgaggccagagtccaataa

SEQ ID NO: 831 - DNA, 519 bp, Homo Sapiens
atgccggacagctgggacaaggatgtgtaccctgagcccccgcgccgcacgccggtgcagcccaatcccatcgtctacatgatgaaagcgttcgacctcatcgtggaccgacccgtgaccctcgtgagagaatttatagagcggcagcacgcaaagaacaggtattactactaccaccggcagtaccgccgcgtgccagacatcactgagtgcaaggaggaggacatcatgtgcatgtatgaagccgaaatgcagtggaagagggactacaaagtcgaccaagaaattatcaacattatgcaggatcggctcaaagcctgtcagcagagggaaggacagaactaccagcagaactgtatcaaggaagtggagcagttcacccaggtggccaaggcctaccaggaccgctatcaggacctgggggcctacagttctgccaggaagtgcctggccaaacagaggcagaggatgctgcaagagagaaaagctgcaaaagaggccgccgctgccacctcctga

SEQ ID NO: 832 - DNA, 519 bp, Homo Sapiens
atgattatctaccgggacctcatcagccacgatgagatgttctccgacatctacaagatccgggagatcgcggacgggttgtgcctggaggtggaggggaagatggtcagtaggacagaaggtaacattgatgactcgctcattggtggaaatgcctccgctgaaggccccgagggcgaaggtaccgaaagcacagtaatcactggtgtcgatattgtcatgaaccatcacctgcaggaaacaagtttcacaaaagaagcctacaagaagtacatcaaagattacatgaaatcaatcaaagggaaacttgaagaacagagaccagaaagagtaaaaccttttatgacaggggctgcagaacaaatcaagcacatccttgctaatttcaaaaactaccagttctttattggtgaaaacatgaatccagatggcatggttgctctattggactaccgtgaggatggtgtgaccccatatatgattttctttaaggatggtttagaaatggaaaaatgttaa

SEQ ID NO: 833 - DNA, 1614 bp, Homo Sapiens
atggcccactgcgtgaccttggttcagctgtccatttcctgtgaccatctcattgacaaggacatcggctccaagtctgacccactctgcgtccttttacaggatgtgggagggggcagctgggctgagcttggccggactgaacgggtgcggaactgctcaagccctgagttctccaagactctacagcttgagtaccgctttgagacagtccagaagctacgctttggaatctatgacatagacaacaagacgccagagctgagggatgatgacttcctagggggtgctgagtgttccctaggacagattgtgtccagccaggtactgactctccccttgatgctgaagcctggaaaacctgctgggcgggggaccatcacggtctcagctcaggaattaaaggacaatcgtgtagtaaccatggaggtagaggccagaaacctagataagaaggacttcctgggaaaatcagatccatttctggagttcttccgccagggtgatgggaaatggcacctggtgtacagatctgaggtcatcaagaacaacctgaaccctacatggaagcgtttctcagtccccgttcagcatttctgtggtgggaaccccagcacacccatccaggtgcaatgctccgattatgacagtgacgggtcacatgatctcatcggtaccttccacaccagcttggcccagctgcaggcagtcccggctgagtttgaatgcatccaccctgagaagcagcagaaaaagaaaagctacaagaactctggaactatccgtgtcaagatttgtcgggtagaaacagagtactcctttctggactatgtgatgggaggctgtcagatcaacttcactgtgggcgtggacttcactggctccaatggagacccctcctcacctgactccctacactacctgagtccaacaggggtcaatgagtacctgatggcactgtggagtgtgggcagcgtggttcaggactatgactcagacaagctgttccctgcatttggatttggggcccaggttccccctgactggcaggtctcgcatgaatttgccttgaatttcaaccccagtaacccctactgtgcaggcatccagggcattgtggatgcctaccgccaagccctgccccaagttcgcctctatggccctaccaactttgcacccatcatcaaccatgtggccaggtttgcagcccaggctgcacatcaggggactgcctcgcaatacttcatgctgttgctgctgactgatggtgctgtgacggatgtggaagccacacgtgaggctgtggtgcgtgcctcgaacctgcccatgtcagtgatcattgtgggtgtgggtggtgctgactttgaggccatggagcagctggacgctgatggtggacccctgcatacacgttctgggcaggctgctgcccgcgacattgtgcagtttgtaccctaccgccggttccagaatgcccctcgggaggcattggcacagaccgtgctcgcagaagtgcccacacaactggtctcatacttcagggcccagggttgggccccgctcaagccacttccaccctcagccaaggatcctgcacaggccccccaggcctag

SEQ ID NO: 834 - DNA, 1131 bp, Homo Sapiens
atggagtcctacgatgtgatcgccaaccagcctgtcgtgatcgacaacggatccggtgtgattaaagctggttttgctggtgatcagatccccaaatactgctttccaaactatgtgggccgacccaagcacgttcgtgtcatggcaggagcccttgaaggcgacatcttcattggccccaaagctgaggagcaccgagggctgctttcaatccgctatcccatggagcatggcatcgtcaaggattggaacgacatggaacgcatttggcaatatgtctattctaaggaccagctgcagactttctcagaggagcatcctgtgctcctgactgaggcgcctttaaacccacgaaaaaaccgggaacgagctgccgaagttttcttcgagaccttcaatgtgcccgctcttttcatctccatgcaagctgtactcagcctttacgctacaggcaggaccacaggggtggtgctggattctggggatggagtcacccatgctgtgcccatctatgagggctttgccatgccccactccatcatgcgcatcgacatcgcgggccgggacgtctctcgcttcctgcgcctctacctgcgtaaggagggctacgacttccactcatcctctgagtttgagattgtcaaggccataaaagaaagagcctgttacctatccataaacccccaaaaggatgagacgctagagacagagaaagctcagtactacctgcctgatggcagcaccattgagattggtccttcccgattccgggcccctgagttgctcttcaggccagatttgattggagaggagagtgaaggcatccacgaggtcctggtgttcgccattcagaagtcagacatggacctgcggcgcacgcttttctctaacattgtcctctcaggaggctctaccctgttcaaaggttttggtgacaggctcctgagtgaagtgaagaaactagctccaaaagatgtgaagatcaggatatctgcacctcaggagagactgtattccacgtggattgggggctccatccttgcctccctggacacctttaagaagatgtgggtctccaaaaaggaatatgaggaagacggtgcccgatccatccacagaaaaaccttctaa

SEQ ID NO: 835 - DNA, 1281 bp, Homo Sapiens
atggctcacctccggggatttgccaaccagcactctcgagtggaccctgaggagctcttcaccaagctcgaccgcattggcaagggctcgtttggggaggtctacaagggcatcgataaccacacaaaggaggtggtggccatcaagatcatcgacctggaggaggccgaggatgagatcgaggacatccagcaggagatcactgtcctcagtcagtgcgacagcccctacatcacccgctactttggctcctacctaaagagcaccaagctatggatcatcatggagtacctgggcggcggctcagcactggacttgcttaaaccaggtcccctggaggagacatacattgccacgatcctgcgggagattctgaagggcctggattatctgcactccgaacgcaagatccaccgagacatcaaagctgccaacgtgctactctcggagcagggtgacgtgaagctggcggactttggggtagcagggcagctcacagacacgcagattaagaggaacacattcgtgggcacccccttctggatggcacctgaggtcatcaagcagtcggcctacgacttcaaggctgacatctggtccctggggatcacagccatcgagctggccaagggggagcctccaaactctgacctccaccccatgcgcgtcctgttcctgattcccaagaacagcccacccacactggagggccagcacagcaagcccttcaaggagttcgtggaggcctgcctcaacaaagacccccgattccggcccacggccaaggagctcctgaagcacaagttcatcacacgctacaccaagaagacctccttcctcacggagctcatcgaccgctataagcgctggaagtcagaggggcatggcgaggagtccagctctgaggactctgacattgatggcgaggcggaggacggggagcagggccccatctggacgttcccccctaccatccggccgagtccacacagcaagcttcacaaggggacggccctgcacagttcacagaagcctgcggagcccgtcaagaggcagccgaggtcccagtgcctgtccacgctggtccggcccgtcttcggagagctcaaagagaagcacaagcagagcggcgggagcgtgggtgcgctggaggagctggagaacgccttcagcctggccgaggagtcctgccccggcatctcagacaagctgatggtgcacctggtggagcgagtgcagaggttttcacacaacagaaaccacctgacatccacccgctga

SEQ ID NO: 836 - DNA, 1506 bp, Homo Sapiens
atggagacaatactggagcagcagcggcgctatcatgaggagaaggaacggctcatggacgtcatggctaaagagatgctcaccaagaagtccacgctccgggaccagatcaattctgatcaccgcactcgggccatgcaagataggtatatggaggtcagtgggaacctgagggatttgtatgatgataaggatggattacgaaaggaggagctcaatgccatttcaggacccaatgagtttgctgaattctataatagactcaagcaaataaaggaattccaccggaagcacccaaatgagatctgtgtgccaatgtcagtggaatttgaggaactcctgaaggctcgagagaatccaagtgaagaggcacaaaacttggtggagttcacagatgaagagggatatggtcgttatctcgatctccatgactgttacctcaagtacattaacctgaaggcatctgagaagctggattatatcacatacctgtccatctttgaccaattatttgacattcctaaagaaaggaagaatgcagagtataagagatacctagagatgctgcttgagtaccttcaggattacacagatagagtgaagcctctccaagatcagaatgaactttttgggaagattcaggctgagtttgagaagaaatgggagaatgggacctttcctggatggccgaaagagacaagcagtgccctgacccatgctggagcccatcttgacctctctgcattctcctcctgggaggagttggcttctctgggtttggacagattgaaatctgctctcttagctttaggcttgaaatgtggcgggaccctagaagagcgagcccagagactattcagtaccaaaggaaagtccctggagtcacttgatacctctttgtttgccaaaaatcccaagtcaaagggcaccaagcgagacactgaaaggaacaaagacattgcttttctagaagcccagatctatgaatatgtagagattctcggggaacagcgacatctcactcatgaaaatgtacagcgcaagcaagccaggacaggagaagagcgagaagaagaggaagaagagcagatcagtgagagtgagagtgaagatgaagagaacgagatcatttacaaccccaaaaacctgccacttggctgggatggcaaacctattccctactggctgtataagcttcatggcctaaatatcaactacaactgtgagatttgtggaaactacacctaccgagggcccaaagccttccagcgacactttgctgaatggcgtcatgctcatggcatgaggtgtttgggcatcccaaacactgctcactttgctaatgtgacacagattgaagatgctgtctccttgtgggccaaactgaaattgcagaaggcttcagaacgatggcagcctgacactgaggaagaatatgaagactcaagtgggaatgttgtgaataagaagacatacgaggatctgaaaagacaaggactgctctag

SEQ ID NO: 837 - DNA, 7554 bp, Homo Sapiens
atggtgggggaacggcatgctggggacctcatggtgcccttagggcctcggctgcaggcatatcctgaagaactcattcgacagaggcctgggcatgacgggcatcctgaatacctgatccgatggagtgtcctgaagtgtggggaagtgggcaaagtgggtgtggaagaaggcaaagcagagcacatcctcatgtggctgtcggctcctgaggtctacgccaactgccctgggctgttaggtgagcgggcactatctaagggacttcagcacgaaccagctggggtttcaggaagctttcctcgagatccaggaggcctggatgaagtggcaatgggagagatggaggctgatgttcaggcgctggtacgcagggcggccaggcagctggcagaaagtgggaccccaagcctcacggccgctgtgcttcacaccatccacgtgctcagtgcctacgccagcatcgggcccctcactggtgtcttcagggagacaggagccctggacctgctcatgcacatgttatgcaatcctgagcctcagatccgccggagtgcaggcaaaatgctgcaggctctggcagcccacgatgctgggagtcgggctcacgtccttctatcactgagccagcaagatggcatcgagcagcacatggattttgacagtcgctatacattgctggagctgtttgcagaaaccacatcctctgaagaacactgcatggcctttgagggcattcatctgcctcagatcccaggaaagctgcttttctccttggtgaagcgctacctttgtgtcacgtccctcctggatcagctgaatagcagtccagagctgggagctggagaccaaagctccccatgtgccacaagagagaaaagccggggacagcgggaactggagttcagcatggctgtgggcaacctcatctctgagcttgtgcggagcatgggctgggcccggaacctcagcgaacagggcatgtcacctccccggccaacccggtccatctttcagccctacatttcaggccccagccttttactccccaccattgtcaccacccccagaagacaagggtgggtcttccgccagcgctctgaattctccagccgtagtggctatggagaatatgtgcagcagacactccagccagggatgcgagtgcggatgctggatgattatgaggagatcagtgctggggacgagggcgagttccggcagagcaacaacggcattccccctgtgcaggttttctggcagtcgacaggccgcacttactgggtgcactggcacatgctggagatcctgggccctgaggaagccactgaggataaggcttcagcagctgtggagaagggggcaggggctactgtgttgggcacagcatttccctcctgggactggaatcctatggatgggctgtaccctttgccgtacctccagcccgaacctcagaagaatgagagagtgggatatctgacccaggctgaatggtgggagctgcttttctttatcaaaaagttggacttgtgtgagcagcagccaattttccagaatctttggaagaacctggatgagaccctgggtgaaaaggccctaggtgagatctctgtgtccgtggaaatggccgagagtctgctgcaggttctcagtagtcgatttgagggcagcactctcaatgacctgctcaactcccagatctacaccaagtatgggctgctgtctaatgaaccaagcagctcgtctacttcacgaaatcactcctgtaccccagatccagaagaggagtccaagtcggaggccagcttctcagaggaagagactgagtccctcaaagcaaaggccgaggcccctaagacagaggccgagcccaccaagacaaggaccgagacccccatggcacagagtgattctcagctgtttaaccagcttctggtgactgaggggatgaccctgcccactgagatgaaggaggcagccagtgaaatggccagagccttgcggggtcccggtcctcgcagctccctggatcagcatgtggcagcggtcgtggccactgtgcagatatccagcttggacacaaacctgcagctttcagggctctctgccctctctcaggctgtggaggaggtcactgagcgggaccaccctctggtccgtcctgacagatcgctgagagagaagctagtgaagatgctggtggagctgctgaccaaccaggtgggagagaagatggtggtcgtgcaggccctgcgcctcctttacctgctcatgaccaagcacgagtggcggccgctctttgccagggagggtggcatctatgctgtgctggtctgcatgcaagaatataagacttctgtcttggtgcagcaggctgggctggcggcactgaagatgctggccgtcgccagctcctcggagatccccacttttgttactggccgagattctatccactctttgtttgatgctcagatgaccagagagatcttcgccagcatcgactcagccacacgcccgggctctgagagcctgctcctcactgtccctgcagccgtgatcctgatgctgaatactgaggggtgctcttctgcagcgagaaatggcttactcctgctcaacctacttttgtgcaaccaccacactctgggagaccagattataacccaagagctgagagacacgttgtttaggcactcagggatagcaccaagaacagaacctatgcctaccacacgcaccatcctcatgatgcttctcaatcgctactcagagccgccgggcagccctgagcgtgcagcactagagacccccatcatccagggtcaggatgggtcccctgagctactgattcgatccctggttgggggcccatctgcagaactactcctggacttggagcgtgtgctgtgccgtgagggcagccccggaggtgccgtgaggcccctcctcaagcgcctccagcaggagacccagcctttcctcctgttgctgcggactctggatgctccggggcccaacaagactctgctgctgtctgtgctgagggtcataacccgactgctggatttccctgaggcaatggtcctcccctggcacgaggtcttggagccctgcctcaactgcctgagtggccctagcagtgactccgagattgttcaggagctgacctgcttcctacatcgcctggcctcgatgcataaggactatgctgtggtgctctgctgcctgggagcaaaagagatcctctccaaagtcctggacaagcactcagctcagctgctgctgggctgtgagcttcgggacctggtgacagagtgtgagaagtacgcacagctctatagcaacctcacctccagcatcctggccggctgcattcagatggtgctgggccagatcgaagaccacagacgaacccaccaacccatcaatatccccttctttgatgtgttcctcaggcatctctgccagggctccagtgtggaagtgaaggaggacaagtgctgggagaaggtggaggtgtcctccaacccgcaccgagccagcaagctgacggaccacaaccccaagacctactgggagtccaacggcagcaccggctcccactacatcaccctgcacatgcaccgtggtgttcttgttaggcagctcactttgctggtggccagtgaggactcaagctacatgccagccagggtggtggtgtttgggggtgacagcaccagctgcatcggcactgagctcaacacggtgaatgtgatgccctctgccagccgggtgatcctcttggagaacctgaaccgcttctggcccatcatccagatccgcataaagcgctgccagcagggcggcattgacacccgggttcggggtgtggaggtcctgggccctaagcccacattctggccactgttccgggagcagctgtgtcgccgaacatgtctcttctacacaattcgggcacaagcctggagccgggacatagcagaggaccaccggcgcctcctccagctctgtcccagactgaacagggttttgcgccacgagcagaattttgctgaccgcttcctccctgatgatgaggccgcccaggcactgggcaagacctgctgggaggccctggtcagccccctggtgcagaacatcacctctcccgatgcggaaggcgtgagtgccctgggatggctgctggatcagtacttagaacagagagagacctctcggaaccccttgagtcgagcagcgtcctttgcttctcgagttcgtcgcctttgccacttgctggtgcatgtggaacctcctcctgggccttctcctgagccatccactcggcccttcagcaagaacagcaagggtcgggaccggagcccggcgccttcgccagtgcttccaagcagcagcctgaggaacataacccagtgctggctgagcgtggtgcaggagcaggtcagcagattcctggctgcagcttggagggccccagactttgtgcctcgttactgtaaactctatgagcacttgcagagagcaggctccgagctgtttgggcctcgggcagccttcatgctggctctgcgcagtggcttctctggcgccttgctgcagcagtccttcctcactgctgctcacatgagtgagcagtttgccaggtacattgaccaacagatccagggtggcctgattggtggagcccctggagtggaaatgctggggcagcttcagcggcacctggaacccattatggtcctttctggtctggaactggccacaacttttgagcacttctatcagcattatatggcggaccgtctcctgagctttggttcgagctggctggagggggctgtgctagagcagattggcctctgttttcccaaccgcctcccacagctgatgctgcagagcctgagcacctctgaggagctgcagcgccagttccacctcttccagctccagcggctcgacaagttgttcttggagcaggaagatgaggaggaaaagagactagaggaagaggaggaggaagaggaggaagaggaagctgagaaagaattatttatcgaagatccaagtccagccatttctatactggtcctgtcaccacgctgctggcccgtctccccactctgctacctgtaccatcccagaaagtgccttcccacagaattctgtgatgcccttgaccgtttctccagtttctacagccagagtcagaaccatccagtcctggacatgggaccacatcggcgactgcagtggacgtggctgggccgggctgagctgcagtttgggaagcagatactgcatgtgtccaccgtgcagatgtggctgctgctgaaattcaatcagacagaggaggtgtcagtagagaccttgctgaaggattctgacctctccccagagctgctgctccaggcactcgtgcccctcacctcagggaatggccctttgaccctgcatgagggccaggactttccacacgggggtgtgctgcggcttcatgagcctgggccccagcgcagtggggaggccctgtggctgatacctccccaggcatacctgaacgtagagaaggatgaaggccgaaccctggaacagaagaggaatctcttgagctgtcttcttgttcgtattctcaaagcccatggggaaaagggcctccacattgatcagctggtttgtctggtgctggaggcctggcagaagggtccaaatcctcctggaaccctgggccacactgttgctgggggtgtggcctgtaccagtacagatgtcctctcttgcatcctgcacctcttaggccagggctacgtgaaacggcgtgatgaccggccccagatcctgatgtatgccgctccagagcccatggggccctgccggggtcaggcagatgtccctttctgtggcagccagagcgaaacctccaagcccagcccagaagctgtggctaccctggcatctctacagctgcctgcaggccgcaccatgagcccccaggaagtagaagggttgatgaagcagacggtgcgtcaggtgcaggagacgctgaacttagagccagatgtcgctcagcaccttttggctcattcccactggggcgctgaacagctgctgcagagctacagtgaggaccctgagccactgctgctggcagctgggctgtgcgtacaccaggctcaggctgtacccgtacggcctgaccactgccccgtctgtgtgagccccctggggtgtgacgacgacctgccctctctctgctgcatgcactattgctgtaagtcttgctggaatgagtacctgacaactcggatcgagcagaaccttgttttgaattgcacctgccccattgccgactgccccgcccagcccaccggagccttcattcgtgccatcgtctcctcgccagaggtcatctccaagtatgagaaggcgctcctgcgtggctatgtggagagctgctccaacctgacctggtgcaccaacccccagggctgcgaccgcatcctgtgccgccagggcctgggctgtgggaccacctgctccaagtgtggctgggcctcttgcttcaactgtagcttccctgaggcacactaccctgctagctgtggccatatgtctcagtgggtcgacgacggtggctactatgacggcatgagcgtggaggcgcagagcaagcacctggccaagctcatctccaagcgctgtcccagctgtcaggctcccatcgagaagaacgaggggtgcctgcacatgacctgtgccaaatgtaaccatggattctgctggcgctgcctcaagtcctggaagccaaatcacaaagactattacaactgctctgccatggtaagcaaggcagctcgccaggagaagcggtttcaggactataatgagaggtgcactttccatcaccaggcgcgggagtttgctgtgaacttgcggaaccgggtgtctgccatccatgaagtgcccccgcccagatccttcaccttcctcaatgatgcctgccagggactggagcaggctcggaaggtgctggcctacgcctgcgtgtacagcttctacagccaggacgcagagtacatggatgtggtggagcagcagacagagaacctggagctgcacaccaatgccctgcagatcctcctggaggaaaccctgctgcggtgcagagacctggcctcctccctgcgcctcctgcgggccgactgcctcagcacgggcatggagctgctccggcggatccaggagaggctgcttgccatcctgcagcattctgcccaggatttccgggttggtcttcagagtccatcagtagaggcctgggaggcaaaaggacccaacatgcctggcagtcagccccaggcctcctcagggccagaggcagaagaggaggaggaagacgatgaggatgatgtgcccgagtggcagcaggatgagtttgatgaggagctggacaatgacagcttctcctacgatgagtctgagaacctggaccaagagactttcttctttggtgatgaggaagaggatgaagatgaggcctatgactga

SEQ ID NO: 838 - DNA, 2370 bp, Homo Sapiens
atggcggcggcgccggtagcggctgggtctggagccggccgagggagacggtcggcagccacagtggcggcttggggcggatggggcggccggccgcggcctggtaacattctgctgcagctgcggcagggccagctgaccggccggggcctggtccgggcggtgcagttcactgagacttttttgacggagagggacaaacaatccaagtggagtggaattcctcagctgctcctcaagctgcacaccaccagccacctccacagtgactttgttgagtgtcaaaacatcctcaaggaaatttctcctcttctctccatggaggctatggcatttgttactgaagagaggaaacttacccaagaaaccacttatccaaatacttacatttttgacttgtttggaggtgttgatcttcttgtagaaattcttatgaggcctacgatctctatccggggacagaaactgaaaataagtgatgaaatgtccaaggactgcttgagtatcctgtataatacctgtgtctgtacagagggagttacaaagcgtttggcagaaaagaatgactttgtgatcttcctgtttacattgatgacaagtaagaagacattcttacaaacagcaaccctcattgaagatattttgggtgttaaaaaggaaatgatccgactagatgaagtccccaatctgagttccttagtatccaatttcgatcagcagcagctcgctaatttctgccggattctggctgtcaccatttcagagatggatacagggaatgatgacaagcacacgcttcttgccaaaaatgctcaacagaagaagagcttgagtttggggccttctgcagctgaaatcaatcaagcggcccttctcagcattcctggctttgttgagcggctttgcaaactggcgactcgaaaggtgtcagagtcaacgggcacagccagcttccttcaggagttggaagagtggtacacatggctagacaatgctttggtgctagatgccctgatgcgagtggccaatgaggagtcagagcacaatcaaggggcttctgaggagaatggcctgcctcacacgtcagccagaacccagctgccccagtcaatgaagattatgcatgagatcatgtacaaactggaagtgctctatgtcctctgcgtgctgctgatggggcgtcagcgaaaccaggttcacagaatgattgcagagttcaagctgatccctggacttaataatttgtttgacaaactgatttggaggaagcattcagcatctgcccttgtcctccatggtcacaaccagaactgtgactgtagcccggacatcaccttgaagatacagtttttgaggcttcttcagagcttcagtgaccaccacgagaacaagtacttgttactcaacaaccaggagctgaatgaactcagtgccatctctctcaaggccaacatccctgaggtggaagctgtcctcaacaccgacaggagtttggtgtgtgatgggaagaggggcttattaactcgtctgctgcaggtcatgaagaaggagccagcagagtcgtctttcaggttttggcaagctcgggctgtggagagtttcctccgagggaccacctcctatgcagaccagatgttcctgctgaagcgaggcctcttggagcacatcctttactgcattgtggacagcgagtgtaagtcaagggatgtgctccagagttactttgacctcctgggggagctgatgaagttcaacgttgatgcattcaagagattcaataaatatatcaacaccgatgcaaagttccaggtattcctgaagcagatcaacagctccctggtggactccaacatgctggtgcgctgtgtcactctgtccctggaccgatttgaaaaccaggtggatatgaaagttgccgaggtactgtctgaatgccgcctgctcgcctacatatcccaggtgcccacgcagatgtccttcctcttccgcctcatcaacatcatccacgtgcagacgctgacccaggagaacgtcagctgcctcaacaccagcctggtgatcctgatgctggcccgacggaaagagcggctgcccctgtacctgcggctgctgcagcggatggagcacagcaagaagtaccccggcttcctgctcaacaacttccacaacctgctgcgcttctggcagcagcactacctgcacaaggacaaggacagcacctgcctagagaacagctcctgcatcagcttctcatactggaaggagacagtgtccatcctgttgaacccggaccggcagtcaccctctgctctcgttagctacattgaggagccctacatggacatagacagggacttcactgaggagtga

SEQ ID NO: 839 - DNA, 1272 bp, Homo Sapiens
atggcgggcaagcggtccggctggagccgggcggctctcctccagctccttctcggcgtgaacctggtggtgatgccgcccacccgggcccggagtctgcgcttcgttaccttgctgtaccgccatggagaccgttcaccagtgaagacatatcccaaggacccctatcaggaagaagaatggccccaggggtttggtcagttaaccaaggaggggatgctacagcactgggaactgggccaggccctgcggcagcgctatcacggcttcctaaacacctcttatcaccggcaagaggtttatgtgcgaagcacagactttgaccggactctcatgagtgctgaggccaacctggctggactcttccctcccaacgggatgcagcgcttcaacccgaacatctcgtggcagcctattcctgtgcacactgtgcccatcactgaggacaggctgctgaagttcccgttgggcccatgtccccgttatgagcagctgcagaacgagacccggcagacaccagagtatcagaatgagagttctcggaatgcacaatttctggacatggtggccaacgagacagggcttacagacctgacactggagaccgtctggaatgtctatgacacactcttctgtgagcaaacgcacgggctgcgcctgccgccctgggcctcaccccaaaccatgcagcgtctcagccggctaaaggacttcagcttccgcttcctcttcggaatctaccagcaggcggagaaggcccggcttcaggggggagtcctgctggctcagataaggaagaacctgaccctaatggcgaccacctcccagctccccaagctgctggtttactctgcgcacgacactaccctggttgccctgcaaatggcactggatgtctacaatggtgaacaagccccctacgcctcctgccacatatttgaactgtaccaggaagattctgggaatttctcagtggagatgtactttcggaacgagagtgacaaggccccctggccgctcagcctgcctggctgccctcaccgctgcccactgcaggacttccttcgcctcacagagcccgtcgtgcccaaggattggcagcaggagtgccagctggcaagcggtcctgcagacacagaggtgattgtggccttggctgtatgtggctccatcctcttcctcctcatagtgctgctcctcaccgtcctcttccggatgcaggcccagcctcctggctaccgccacgtcgcagatggggaggaccacgcctga

SEQ ID NO: 840 - DNA, 1482 bp, Homo Sapiens
atgctggctgccacagtcctgaccctggccctgctgggcaatgcccatgcctgctccaaaggcacctcgcacgaggcaggcatcgtgtgccgcatcaccaagcctgccctcctggtgttgaaccacgagactgccaaggtgatccagaccgccttccagcgagccagctacccagatatcacgggcgagaaggccatgatgctccttggccaagtcaagtatgggttgcacaacatccagatcagccacttgtccatcgccagcagccaggtggagctggtggaagccaagtccattgatgtctccattcagaacgtgtctgtggtcttcaaggggaccctgaagtatggctacaccactgcctggtggctgggtattgatcagtccattgacttcgagatcgactctgccattgacctccagatcaacacacagctgacctgtgactctggtagagtgcggaccgatgcccctgactgctacctgtctttccataagctgctcctgcatctccaaggggagcgagagcctgggtggatcaagcagctgttcacaaatttcatctccttcaccctgaagctggtcctgaagggacagatctgcaaagagatcaacgtcatctctaacatcatggccgattttgtccagacaagggctgccagcatcctttcagatggagacattggggtggacatttccctgacaggtgatcccgtcatcacagcctcctacctggagtcccatcacaagggtcatttcatctacaagaatgtctcagaggacctccccctccccaccttctcgcccacactgctgggggactcccgcatgctgtacttctggttctctgagcgagtcttccactcgctggccaaggtagctttccaggatggccgcctcatgctcagcctgatgggagacgagttcaaggcagtgctggagacctggggcttcaacaccaaccaggaaatcttccaagaggttgtcggcggcttccccagccaggcccaagtcaccgtccactgcctcaagatgcccaagatctcctgccaaaacaagggagtcgtggtcaattcttcagtgatggtgaaattcctctttccacgcccagaccagcaacattctgtagcttacacatttgaagaggatatcgtgactaccgtccaggcctcctattctaagaaaaagctcttcttaagcctcttggatttccagattacaccaaagactgtttccaacttgactgagagcagctccgagtccgtccagagcttcctgcagtcaatgatcaccgctgtgggcatccctgaggtcatgtctcggctcgaggtagtgtttacagccctcatgaacagcaaaggcgtgagcctcttcgacatcatcaaccctgagattatcactcgagatggcttcctgctgctgcagatggactttggcttccctgagcacctgctggtggatttcctccagagcttgagctag

SEQ ID NO: 841 - DNA, 951 bp, Homo Sapiens
atggcgtctaccagccgtttggatgctcttccaagagtcacatgtccaaaccatccagatgcgattttagtggaggactacagagccggtgatatgatctgtcctgaatgtggcttggttgtaggtgaccgggttattgatgtgggatctgaatggcgaactttcagcaatgacaaagcaacaaaagatccatctcgagttggagattctcagaatcctcttctgagtgatggagatttgtctaccatgattggcaagggcacaggagctgcaagttttgacgaatttggcaattctaagtaccagaatcggagaacaatgagcagttctgatcgggcaatgatgaatgcattcaaagaaatcactaccatggcagacagaatcaatctacctcgaaatatagttgatcgaacaaataatttattcaagcaagtatatgaacagaagagcctgaagggaagagctaatgatgctatagcttctgcttgtctctatattgcctgtagacaagaaggggttcctaggacatttaaagaaatatgtgccgtatcacgaatttctaagaaagaaattggtcggtgttttaaacttattttgaaagcgctagaaaccagtgtggatttgattacaactggggacttcatgtccaggttctgttccaacctttgtcttcctaaacaagtacagatggcagctacacatatagcccgtaaagctgtggaattggacttggttcctgggaggagccccatctctgtggcagcggcagctatttacatggcctcacaggcatcagctgaaaagaggacccaaaaagaaattggagatattgctggtgttgctgatgttacaatcagacagtcctatagactgatctatcctcgagccccagatctgtttcctacagacttcaaatttgacaccccagtggacaaactaccacagctataa

SEQ ID NO: 842 - DNA, 909 bp, Homo Sapiens
atggagcccggccccgacggccccgccgcctccggccccgccgccatccgcgagggctggttccgcgagacctgcagcctgtggcccggccaggccctgtcactgcaggtggagcagctgctccaccaccggcgctcgcgctaccaggacatcctcgtcttccgcagtaagacctatggcaacgtgctggtgttggacggtgtcatccagtgcacggagagagacgagttctcctaccaggagatgatcgccaacctgcctctctgcagccaccccaacccgcgaaaggtgctgatcatcgggggcggagatggaggtgtcctgcgggaggtggtgaagcacccctccgtggagtccgtggtccagtgtgagatcgacgaggatgtcatccaagtctccaagaagttcctgccaggcatggccattggctactctagctcgaagctgaccctacatgtgggtgacggttttgagttcatgaaacagaatcaggatgccttcgacgtgatcatcactgactcctcagaccccatgggccccgccgaaagtctcttcaaggagtcctattaccagctcatgaagacagccctcaaggaagatggtgtcctctgctgccagggcgagtgccagtggctgcacctggacctcatcaaggagatgcggcagttctgccagtccctgttccccgtggtggcctatgcctactgcaccatccccacctaccccagcggccagatcggcttcatgctgtgcagcaagaacccgagcacgaacttccaggagccggtgcagccgctgacacagcagcaggtggcgcagatgcagctgaagtactacaactccgacgtgcaccgcgccgcctttgtgctgcccgagtttgcccgcaaggccctgaatgatgtgagctga

SEQ ID NO: 843 - DNA, 2169 bp, Homo Sapiens
atgtaccgcgcgctgtacgcgttccgctcggcggagcccaacgcgctggcgttcgccgcgggcgagaccttcctggtgctagagcgaagcagcgcgcactggtggctggccgcgcgggcgcgcagtggtgagacgggctacgtgccgccagcctacctgcgccgcctgcagggcctggagcaggatgtcctccaggccattgaccgggccatcgaggctgtacacaacacagccatgcgggatggtggcaagtacagcctggaacagcgtggagtcctccagaagctgatccaccaccggaaagagaccctgtcacgcagaggcccttcagcctccagtgttgcagttatgacctcatcaaccagtgaccaccacttggatgctgctgcagccaggcagcccaatggggtgtgtcgagctgggttcgagcggcagcacagcctacccagttctgagcatcttggggcagatggaggcctctaccagatcccacttccatcttcccagatcccaccacagcctcgccgagcagcacccaccacaccgcccccaccagtgaagcgccgagaccgcgaggccctgatggcctctgggagtggtggccacaacaccatgccctccgggggtaactctgtgtccagcggctcctcagtcagcagcacctccctggacacgctctataccagctccagcccatctgaaccaggctccagctgctcacccacacccccacctgtgccccgccgaggcacccacaccaccgtgtcccaagtccagccccctccctccaaggcatcagcacctgaaccccctgcagaagaagaagtggcaactggtacaacctcagcctctgatgacctggaagccctgggtacactgagcctggggaccacagaggagaaggcagcagctgaggcggctgtgcccaggaccattggggccgagctgatggagctggtgcggagaaacactggcctgagccacgaattatgccgggtggccatcggcatcatagtgggtcacatccaggcctcggtgccggccagctcaccagtcatggagcaggtcctcctctcactcgtagagggcaaggacctcagcatggccctgccctcagggcaggtctgccacgaccagcagaggctggaggtgatctttgcagacctggctcgccggaaggacgacgcccagcagcgcagttgggcactatatgaggatgagggtgtcatccgctgctacctagaggagctgctgcatattctgactgatgcagaccctgaagtttgcaagaaaatgtgcaagagaaacgagttcgagtctgtcctggccttggtggcctattaccaaatggaacaccgagcatcactgcggctgctgctcctcaagtgctttggcgccatgtgcagcctggatgcagccatcatctccacgcttgtgtcatccgtgctgcctgtagagctggcgagggacatgcagacagacacgcaggaccaccagaaactctgttactctgccctcatcctggccatggtcttctccatgggagaggcagtgccctatgcacactatgagcacctgggcacgcctttcgcccagttcctactgaacatcgtcgaggatgggctgcccttggacaccacagagcagctgccggacctctgcgtgaacctgcttctggctctcaacctgcacctgccagctgctgaccagaatgtcatcatggctgccctgagcaaacacgccaatgtcaagatcttctccgagaagctgttgttgctcctgaacagaggggatgaccctgtgcgcatcttcaaacatgagccacagccaccacactctgtcctcaagttcctgcaggacgtgtttggcagcccggccacagctgccatcttctaccacacagacatgatggctctcattgacatcactgtgcggcacatcgcagacctgtcaccaggagacaagctgcgcatggagtacctctccctgatgcatgctatagtccgcaccacaccctacctgcagcaccgccaccggctacccgacctgcaggccatactgcgacgcatcctgaatgaggaggagacctcaccccagtgccagatggaccgcatgattgtccgagagatgtgcaaggaattcctggtgctgggggaggctcccagctag

SEQ ID NO: 844 - DNA, 936 bp, Homo Sapiens
atggccgaggcgtcgccgcatcccggacggtacttctgccactgctgctccgtggagatcgtcccgcgcctgccggattatatctgtccaagatgcgagtctggttttatcgaggagcttccggaagagaccaggagcacagaaaatggttctgccccctccacagctcccacagaccagagccggccaccgttggagcacgtggaccagcacctgttcacgctgccgcagggctacggacagtttgctttcggcatcttcgatgacagcttcgagatccccacgttccctcctggggcgcaggctgacgacggcagggaccctgagagccggcgggagagagaccatccgtcccggcaccggtacggcgcccgacagccccgcgcccgcctcaccacgcggcgggccaccggccggcacgaaggcgtccccacgctggaagggatcatccagcagctcgtcaacggcatcatcacgcccgccaccatccccagcctgggcccctggggagtcctgcactcaaaccctatggactacgcctggggggccaacggcctggatgccatcatcacacagctcctcaatcagtttgaaaacacaggccccccaccggcagataaagagaaaatccaggccctccccaccgtccccgtcactgaggagcacgtaggctccgggctcgagtgccctgtgtgcaaggacgactacgcgctgggtgagcgtgtgcggcagctgccctgcaaccacctgttccacgacggctgcatcgtgccctggctggagcagcacgacagctgccccgtctgccgaaaaagcctcacgggacagaacacggccacgaacccccctggcctcactggggtgagcttctcctcctcgtcgtcatcgtcctcctccagctcgcccagcaacgagaacgccacaagcaactcgtga

SEQ ID NO: 845 - DNA, 1179 bp, Homo Sapiens
atggacctcttcggggacctgccggagcccgagcgctcgccgcgcccggctgccgggaaagaagctcagaaaggacccctgctctttgatgacctccctccggccagcagtactgactcaggatcagggggacctttgctttttgatgatctcccacccgctagcagtggcgattcaggttctcttgccacatcaatatcccagatggtaaagactgaagggaaaggagcaaagagaaaaacctccgaggaagagaagaatggcagtgaagagcttgtggaaaagaaagtttgtaaagcctcttcggtgatctttggtctgaagggctatgtggctgagcggaagggtgagagggaggagatgcaggatgcccacgtcatcctgaacgacatcaccgaggagtgtaggcccccatcgtccctcattactcgggtttcatattttgctgtttttgatggacatggaggaattcgagcctcaaaatttgctgcacagaatttgcatcaaaacttaatcagaaaatttcctaaaggagatgtaatcagtgtagagaaaaccgtgaagagatgccttttggacactttcaagcatactgatgaagagttccttaaacaagcttccagccagaagcctgcctggaaagatgggtccactgccacgtgtgttctggctgtagacaacattctttatattgccaacctcggagatagtcgggcaatcttgtgtcgttataatgaggagagtcaaaaacatgcagccttaagcctcagcaaagagcataatccaactcagtatgaagagcggatgaggatacagaaggctggaggaaacgtcagggatgggcgtgttttgggcgtgctagaggtgtcacgctccattggggacgggcagtacaagcgctgcggtgtcacctctgtgcccgacatcagacgctgccagctgacccccaatgacaggttcattttgttggcctgtgatgggctcttcaaggtctttaccccagaagaagccgtgaacttcatcttgtcctgtctcgaggatgaaaagatccagacccgggaagggaagtccgcagccgacgcccgctacgaagcagcctgcaacaggctggccaacaaggcggtgcagcggggctcggccgacaacgtcactgtgatggtggtgcggatagggcactga

SEQ ID NO: 846 - DNA, 1077 bp, Homo Sapiens
atggcggccgttctgaagccggtgctgctgggccttcgagatgcgccggtgcacggcagccccacagggccgggtgcctggactgctagcaagctgggcggcattccggatgctctgcccaccgtggctgcgcccaggcccgtgtgtcagcgctgcgggcagccgctcgctctggtcgtgcaggtgtattgcccgctggaaggctccccgtttcaccgtctgctgcacgtgttcgcgtgcgcctgccccggctgtagcaccggcggtgcgcgcagctggaaggtgttccgctcccagtgcctgcaggtgccagagagagaggcgcaggacgctcagaaacagggaaacagccttgcagctgaggactggtgtgaaggtgctgatgactggggaagtgatactgaggaggggccttcaccacagtttaccttggattttgggaatgatgccagcagtgccaaagacgtagactggactgctcggctccaagacctccgcctgcaggatgctgtcctgggtgctgcccatcctgtgcctcctgggctgccgctcttcctgccctactacatctgtgttgcagatgaggatgattacagggactttgtcaacctggatcatgcccacagccttctgagggactatcagcagagagaaggcattgccatggatcagttgctttcccaaagccttcctaatgatggtgatgaaaaatatgagaagaccataattaaaagtggagatcagacgttttacaaattcatgaagcgaattgctgcttgtcaggagcagattttgaggtattcctggagtggagagccactctttttgacctgccctacatcagaagtcaccgagctcccagcctgcagccagtgtggaggccaaaggatatttgagtttcagcttatgccagcactggtcagcatgctcaagagtgctaatttaggtctttctgtggaatttggaacaattctagtttacacatgtgagaagagttgctggcccccaaatcatcagactcccatggaagaattttgtattatacaagaagacccagatgaattattgtttaagtag

SEQ ID NO: 847 - DNA, 2772 bp, Homo Sapiens
atgttggagaactacagaaacctggtctccctagctatgtgttctcatttcacccaagactttttgccagtgcaggggatagaagattcattccacaaacttatactgagaagatatgagaaatgtgggcatgataatttacaattaaggaaaggctgtaaaagtatgaacgtgtgtaaagtgcagaagggagtttataatggaattaataaatgcttgtcaaatactcagagcaaaatatttcaatgtaatgcacgtgtcaaagtttttagtaaatttgcaaattcaaacaaagataagacaagacatactggagagaaacactttaaatgtaacgaatgtggcaagtcatttcagaagttctcagacctaactcaacataaaggaattcatgctggagagaaaccctacacttgtgaagaacgtggcaaagactttggatggtacacagacctgaatcaacacaagaaaattcatactggagagaaaccttacaaatgtgaagaatgtggcaaagcctttaataggtcaacaaaccttactgcacataagagaattcacaacagagagaaagcttacacaggtgaagatcgtgacagagcctttggatggtccacaaacctgaatgaatataagaaaattcatactggagataaaccctacaaatgtaaagaatgtgggaaagcctttatgcattcctcacacctgaataaacatgagaaaattcatactggagagaaaccctacaaatgtaaggaatgtggcaaagtcatttcctcatcctcaagctttgctaaacataagaggattcatactggcgagaaaccctttaaatgtttagaatgtggtaaagcctttaatatttccacaacccttactaaacataggagaattcatactggagagaaaccctacacatgtgaagtatgtggcaaagcctttagacagtccgcaaacctttatgtacataggagaattcatactggagagaaaccctacacatgtggagaatgtggcaaaacctttagacagtccgcaaacctttacgtacataggagaattcatactggagagaaaccttacaaatgcgaagactgtggcaaagcctttggacggtacacagccctgaatcaacacaagaaaattcatactggagagaaaccttacaaatgtgaagagtgtggcaaagcctttaatagttcaacaaaccttactgcacataagagaattcacaccagagagaaaccctacacatgtgaagatcgtggcagagcctttggattgtccacaaacctgaatgaatataagaaaattcatactggagataaaccctacaaatgtaaagaatgtgggaaagcctttatacattccttgcacctgaataaacatgagaaaattcatactggaaagaaaccctacaaatgtaagcaatgtggcaaagtcattacctcatcctcaagctttgctaaacataagaggattcatactggcgagaaaccctttgaatgtttagaatgtggtaaagcgtttactagttccacaacccttactaaacataggagaattcatactggagagaaaccctacacatgtgaagtatgtggcaaagcctttagacagtccgcaatcctttatgtacataggagaattcatactggagagaaaccctacacatgtgaagaatgtggcaaaacctttagacagtccgcaaacctttatgtacataggagaattcatactggagagaaaccttacaaatgtgaagagtgtggcaaagcctttggacggtacacagacctgaatcaacacaagaaaattcatactggagagaaactttacaaatgtgaagagtgtggcaaagactttgtatggtacacggacctgaatcaacagaagaaaatttacactggggagaaaccttacaaatgtgaagagtgtggcaaagcctttgccccatcaacagacctgaatcaacacacgaaaattcttactggagagcaaagttacaaatgtgaagagtgtggcaaagcctttggatggtccatagccctgaatcaacacaagaaaattcatactggagaaaaaccttacaaatgtgaagagtgtggcaaagcctttagtaggtcaagaaaccttactacacataggagagttcacactagggagaaaccctacaaatgtgaagatcgtggcagatcctttggatggtccacaaacctgaacgaatataagaaaattcatactggagataaactctacaaatgtaaagaatgtgggaaagtgtttaaacagtcctcacacctgaatagacatgagaaaattcatactggaaagaaaccctacaaatgtaaggaatgtggcaaagtcattacgtcatcctcaagctttgctaaacataagaggattcatacaggtgagaaaccctttaaatgtttagaatgtggtaaagcgtttactagttccacaacccttactaaacataggagaattcatactggagagaaaccctacacatgtgaagaatgtggcaaagcctttagacagtcagcaatcctttatgtacataggagaattcatactggagagaaaccctacacatgtggagaatgtggcaaaacctttagacagtctgcaaatctttatgcgcataagaaaattcatactggagagaaaccctacacgtgtggagactgtggcaaaacctttagacagtctgcaaatctttatgcacataagaaaattcatactggagataaaaccatacaagtgtaa

SEQ ID NO: 848 - DNA, 819 bp, Homo Sapiens
atgagtgatcagcagctggactgtgccttggacctaatgaggcgcctgcctccccagcaaatcgagaaaaacctcagcgacctgatcgacctggtccccagtctatgtgaggatctcctgtcttctgttgaccagccactgaaaattgccagagacaaggtggtgggaaaggattaccttttgtgtgactacaacagagatggggactcctataggtcaccatggagtaacaagtatgaccctcccttggaggatggggccatgccgtcagctcggctgagaaagctggaggtggaagccaacaatgcctttgaccagtatcgagacctgtattttgaaggtggcgtctcatctgtctacctctgggatctggatcatggctttgctggagtgatcctcataaagaaggctggagatggatcaaagaagatcaaaggctgctgggattccatccacgtggtagaagtgcaggagaaatccagcggtcgcaccgcccattacaagttgacctccacggtgatgctgtggctgcagaccaacaaatctggctctggcaccatgaacctcggaggcagccttaccagacagatggagaaggatgaaactgtgagtgactgctccccacacatagccaacatcgggcgcctggtagaggacatggaaaataaaatcagaagtacgctgaacgagatctactttggaaaaacaaaggatatcgtcaatgggctgaggtctgtgcagacttttgcagacaaatcaaaacaagaagctctgaagaatgacctggtggaggctttgaagagaaagcagcaatgctaa

SEQ ID NO: 849 - DNA, 1143 bp, Homo Sapiens
atgggaattcaaggcctggccaaactaattgctgatgtggcccccagtgccatccgggagaatgacatcaagagctactttggccgtaaggtggccattgatgcctctatgagcatttatcagttcctgattgctgttcgccagggtggggatgtgctgcagaatgaggagggtgagaccaccagccacctgatgggcatgttctaccgcaccattcgcatgatggagaacggcatcaagcccgtgtatgtctttgatggcaagccgccacagctcaagtcaggcgagctggccaaacgcagtgagcggcgggctgaggcagagaagcagctgcagcaggctcaggctgctggggccgagcaggaggtggaaaaattcactaagcggctggtgaaggtcactaagcagcacaatgatgagtgcaaacatctgctgagcctcatgggcatcccttatcttgatgcacccagtgaggcagaggccagctgtgctgccctggtgaaggctggcaaagtctatgctgcggctaccgaggacatggactgcctcaccttcggcagccctgtgctaatgcgacacctgactgccagtgaagccaaaaagctgccaatccaggaattccacctgagccggattctgcaggagctgggcctgaaccaggaacagtttgtggatctgtgcatcctgctaggcagtgactactgtgagagtatccggggtattgggcccaagcgggctgtggacctcatccagaagcacaagagcatcgaggagatcgtgcggcgacttgaccccaacaagtaccctgtgccagaaaattggctccacaaggaggctcaccagctcttcttggaacctgaggtgctggacccagagtctgtggagctgaagtggagcgagccaaatgaagaagagctgatcaagttcatgtgtggtgaaaagcagttctctgaggagcgaatccgcagtggggtcaagaggctgagtaagagccgccaaggcagcacccagggccgcctggatgatttcttcaaggtgaccggctcactctcttcagctaagcgcaaggagccagaacccaagggatccactaagaagaaggcaaagactggggcagcagggaagtttaaaaggggaaaataa

SEQ ID NO: 850 - DNA, 2631 bp, Homo Sapiens
atggagctgatcaccattctcgagaagaccgtgtctcccgatcggctggagctggaagcggcgcagaagttcctggagcgtgcggccgtggagaacctgcccactttccttgtggaactgtccagagtgctggcaaatccaggaaacagtcaggttgccagagttgcagctggtctacaaatcaagaactctttgacatctaaagatccagatatcaaggcacaatatcagcagaggtggcttgctattgatgctaatgctcgacgagaagtcaagaactatgttttgcagacattgggtacagaaacttaccggcctagttctgcctcacagtgtgtggctggtattgcttgtgcagagatcccagtaaaccagtggccagaactcattcctcagctggtggccaatgtcacaaaccccaacagcacagagcacatgaaggagtcgacattggaagccatcggttatatttgccaagatatagacccagagcagctacaagataaatccaatgagattctgactgccataatccaggggatgaggaaagaagagcctagtaataatgtgaagctagctgctacgaatgcactcctgaactcattggagttcaccaaagcaaactttgataaagagtctgaaaggcactttattatgcaggtggtctgtgaagccacacagtgtccagatacgagggtacgagtggctgctttacagaatctggtgaagataatgtccttatattatcagtacatggagacatatatgggtcctgctctttttgcaatcacaatcgaagcaatgaaaagtgacattgatgaggtggctttacaagggatagaattctggtccaatgtctgtgatgaggaaatggatttggccattgaagcttcagaggcagcagaacaaggacggccccctgagcacaccagcaagttttatgcgaagggagcactacagtatctggttccaatcctcacacagacactaactaaacaggacgaaaatgatgatgacgatgactggaacccctgcaaagcagcaggggtgtgcctcatgcttctggccacctgctgtgaagatgacattgtcccacatgtcctccccttcattaaagaacacatcaagaacccagattggcggtaccgggatgcagcagtgatggcttttggttgtatcttggaaggaccagagcccagtcagctcaaaccactagttatacaggctatgcccaccctaatagaattaatgaaagaccccagtgtagttgttcgagatacagctgcatggactgtaggcagaatttgtgagctgcttcctgaagctgccatcaatgatgtctacttggctcccctgctacagtgtctgattgagggtctcagtgctgaacccagagtggcttcaaatgtgtgctgggctttctccagtctggctgaagctgcttatgaagctgcagacgttgctgatgatcaggaagaaccagctacttactgcttatcttcttcatttgaactcatagttcagaagctcctagagactacagacagacctgatggacaccagaacaacctgaggagttctgcatatgaatctctgatggaaattgtgaaaaacagtgccaaggattgttatcctgctgtccagaaaacgactttggtcatcatggaacgactgcaacaggttcttcagatggagtcacatatccagagcacatccgatagaatccagttcaatgaccttcagtctttactctgtgcaactcttcagaatgttcttcggaaagtgcaacatcaagatgctttgcagatctctgatgtggttatggcctccctgttaaggatgttccaaagcacagctgggtctgggggagtacaagaggatgccctgatggcagttagcacactggtggaagtgttgggtggtgaattcctcaagtacatggaggcctttaaacccttcctgggcattggattaaaaaattatgctgaataccaggtttgtttggcagctgtgggcttagtgggagacttgtgccgtgccctgcaatccaacatcatacctttctgtgacgaggtgatgcagctgcttctggaaaatttggggaatgagaacgtccacaggtctgtgaagccgcagattctgtcagtgtttggtgatattgcccttgctattggaggagagtttaaaaaatacttagaggttgtattgaatactcttcagcaggcctcccaagcccaggtggacaagtcagactatgacatggtggattatctgaatgagctaagggaaagctgcttggaagcctatactggaatcgtccagggattaaagggggatcaggagaacgtacacccggatgtgatgctggtacaacccagagtagaatttattctgtctttcattgaccacattgctggagatgaggatcacacagatggagtagtagcttgtgctgctggactaataggggacttatgtacagcatttgggaaggatgtactgaaattagtagaagctaggccaatgatccatgaattgttaactgaagggcggagatcgaagactaacaaagcaaaaacccttgctacatgggcaacaaaagaactgaggaaactgaagaaccaagcttga

SEQ ID NO: 851 - DNA, 3774 bp, Homo Sapiens
atggtcgtggcgctgcggtacgtgtggcctctcctcctctgcagcccctgcctgcttatccagatccccgaggaatatgaaggacaccatgtgatggagccacctgtcatcacggaacagtctccacggcgcctggttgtcttccccacagatgacatcagcctcaagtgtgaggccagtggcaagcccgaagtgcagttccgctggacgagggatggtgtccacttcaaacccaaggaagagctgggtgtgaccgtgtaccagtcgccccactctggctccttcaccatcacgggcaacaacagcaactttgctcagaggttccagggcatctaccgctgctttgccagcaataagctgggcaccgccatgtcccatgagatccggctcatggccgagggtgcccccaagtggccaaaggagacagtgaagcccgtggaggtggaggaaggggagtcagtggttctgccttgcaaccctcccccaagtgcagagcctctccggatctactggatgaacagcaagatcttgcacatcaagcaggacgagcgggtgacgatgggccagaacggcaacctctactttgccaatgtgctcacctccgacaaccactcagactacatctgccacgcccacttcccaggcaccaggaccatcattcagaaggaacccattgacctccgggtcaaggccaccaacagcatgattgacaggaagccgcgcctgctcttccccaccaactccagcagccacctggtggccttgcaggggcagccattggtcctggagtgcatcgccgagggctttcccacgcccaccatcaaatggctgcgccccagtggccccatgccagccgaccgtgtcacctaccagaaccacaacaagaccctgcagctgctgaaagtgggcgaggaggatgatggcgagtaccgctgcctggccgagaactcactgggcagtgcccggcatgcgtactatgtcaccgtggaggctgccccgtactggctgcacaagccccagagccatctatatgggccaggagagactgcccgcctggactgccaagtccagggcaggccccaaccagaggtcacctggagaatcaacgggatccctgtggaggagctggccaaagaccagaagtaccggattcagcgtggcgccctgatcctgagcaacgtgcagcccagtgacacaatggtgacccaatgtgaggcccgcaaccggcacgggctcttgctggccaatgcctacatctacgttgtccagctgccagccaagatcctgactgcggacaatcagacgtacatggctgtccagggcagcactgcctaccttctgtgcaaggccttcggagcgcctgtgcccagtgttcagtggctggacgaggatgggacaacagtgcttcaggacgaacgcttcttcccctatgccaatgggaccctgggcattcgagacctccaggccaatgacaccggacgctacttctgcctggctgccaatgaccaaaacaatgttaccatcatggctaacctgaaggttaaagatgcaactcagatcactcaggggccccgcagcacaatcgagaagaaaggttccagggtgaccttcacgtgccaggcctcctttgacccctccttgcagcccagcatcacctggcgtggggacggtcgagacctccaggagcttggggacagtgacaagtacttcatagaggatgggcgcctggtcatccacagcctggactacagcgaccagggcaactacagctgcgtggccagtaccgaactggatgtggtggagagtagggcacagctcttggtggtggggagccctgggccggtgccacggctggtgctgtccgacctgcacctgctgacgcagagccaggtgcgcgtgtcctggagtcctgcagaagaccacaatgcccccattgagaaatatgacattgaatttgaggacaaggaaatggcgcctgaaaaatggtacagtctgggcaaggttccagggaaccagacctctaccaccctcaagctgtcgccctatgtccactacacctttagggttactgccataaacaaatatggccccggggagcccagcccggtctctgagactgtggtcacacctgaggcagccccagagaagaaccctgtggatgtgaagggggaaggaaatgagaccaccaatatggtcatcacgtggaagccgctccggtggatggactggaacgccccccaggttcagtaccgcgtgcagtggcgccctcaggggacacgagggccctggcaggagcagattgtcagcgaccccttcctggtggtgtccaacacgtccaccttcgtgccctatgagatcaaagtccaggccgtcaacagccagggcaagggaccagagccccaggtcactatcggctactctggagaggactacccccaggcaatccctgagctggaaggcattgaaatcctcaactcaagtgccgtgctggtcaagtggcggccggtggacctggcccaggtcaagggccacctccgcggatacaatgtgacgtactggagggagggcagtcagaggaagcacagcaagagacatatccacaaagaccatgtggtggtgcccgccaacaccaccagtgtcatcctcagtggcttgcggccctatagctcctaccacctggaggtgcaggcctttaacgggcgaggatcggggcccgccagcgagttcaccttcagcaccccagagggagtgcctggccaccccgaggcgttgcacctggagtgccagtcgaacaccagcctgctgctgcgctggcagcccccactcagccacaacggcgtgctcaccggctacgtgctctcctaccaccccctggatgaggggggcaaggggcaactgtccttcaaccttcgggaccccgaacttcggacacacaacctgaccgatctcagcccccacctgcggtaccgcttccagcttcaggccaccaccaaagagggccctggtgaagccatcgtacgggaaggaggcactatggccttgtctgggatctcagattttggcaacatctcagccacagcgggtgaaaactacagtgtcgtctcctgggtccccaaggagggccagtgcaacttcaggttccatatcttgttcaaagccttgggagaagagaagggtggggcttccctttcgccacagtatgtcagctacaaccagagctcctacacgcagtgggacctgcagcctgacactgactacgagatccacttgtttaaggagaggatgttccggcaccaaatggctgtgaagaccaatggcacaggccgcgtgaggctccctcctgctggcttcgccactgagggctggttcatcggctttgtgagtgccatcatcctcctgctcctcgtcctgctcatcctctgcttcatcaagcgcagcaagggcggcaaatactcagtgaaggataaggaggacacccaggtggactctgaggcccgaccgatgaaagatgagaccttcggcgagtacaggtccctggagagtgacaacgaggagaaggcctttggcagcagccagccatcgctcaacggggacatcaagcccctgggcagtgacgacagcctggccgattatgggggcagcgtggatgttcagttcaacgaggatggttcgttcattggccagtacagtggcaagaaggagaaggaggcggcagggggcaatgacagctcaggggccacttcccccatcaaccctgccgtggccctagaatag

SEQ ID NO: 852 - DNA, 2343 bp, Homo Sapiens
atgacccatgaagagcaccatgcagccaaaaccctggggattggcaaagccattgctgtcttaacctctggtggagatgcccaaggtatgaatgctgctgtcagggctgtggttcgagttggtatcttcaccggtgcccgtgtcttctttgtccatgagggttatcaaggcctggtggatggtggagatcacatcaaggaagccacctgggagagcgtttcgatgatgcttcagctgggaggcacggtgattggaagtgcccggtgcaaggactttcgggaacgagaaggacgactccgagctgcctacaacctggtgaagcgtgggatcaccaatctctgtgtcattgggggtgatggcagcctcactggggctgacaccttccgttctgagtggagtgacttgttgagtgacctccagaaagcaggtaagatcacagatgaggaggctacgaagtccagctacctgaacattgtgggcctggttgggtcaattgacaatgacttctgtggcaccgatatgaccattggcactgactctgccctgcatcggatcatggaaattgtagatgccatcactaccactgcccagagccaccagaggacatttgtgttagaagtaatgggccgccactgtggatacctggcccttgtcacctctctgtcctgtggggccgactgggtttttattcctgaatgtccaccagatgacgactgggaggaacacctttgtcgccgactcagcgagacaaggacccgtggttctcgtctcaacatcatcattgtggctgagggtgcaattgacaagaatggaaaaccaatcacctcagaagacatcaagaatctggtggttaagcgtctgggatatgacacccgggttactgtcttggggcatgtgcagaggggtgggacgccatcagcctttgacagaattctgggcagcaggatgggtgtggaagcagtgatggcacttttggaggggaccccagataccccagcctgtgtagtgagcctctctggtaaccaggctgtgcgcctgcccctcatggaatgtgtccaggtgaccaaagatgtgaccaaggccatggatgagaagaaatttgacgaagccctgaagctgagaggccggagcttcatgaacaactgggaggtgtacaagcttctagctcatgtcagacccccggtatctaagagtggttcgcacacagtggctgtgatgaacgtgggggctccggctgcaggcatgaatgctgctgttcgctccactgtgaggattggccttatccagggcaaccgagtgctcgttgtccatgatggtttcgagggcctggccaaggggcagatagaggaagctggctggagctatgttgggggctggactggccaaggtggctctaaacttgggactaaaaggactctacccaagaagagctttgaacagatcagtgccaatataactaagtttaacattcagggccttgtcatcattgggggctttgaggcttacacagggggcctggaactgatggagggcaggaagcagtttgatgagctctgcatcccatttgtggtcattcctgctacagtctccaacaatgtccctggctcagacttcagcgttggggctgacacagcactcaatactatctgcacaacctgtgaccgcatcaagcagtcagcagctggcaccaagcgtcgggtgtttatcattgagactatgggtggctactgtggctacctggctaccatggctggactggcagctggggccgatgctgcctacatttttgaggagcccttcaccattcgagacctgcaggcaaatgttgaacatctggtgcaaaagatgaaaacaactgtgaaaaggggcttggtgttaaggaatgaaaagtgcaatgagaactataccactgacttcattttcaacctgtactctgaggaggggaagggcatcttcgacagcaggaagaatgtgcttggtcacatgcagcagggtgggagcccaaccccatttgataggaattttgccactaagatgggcgccaaggctatgaactggatgtctgggaaaatcaaagagagttaccgtaatgggcggatctttgccaatactccagattcgggctgtgttctggggatgcgtaagagggctctggtcttccaaccagtggctgagctgaaggaccagacagattttgagcatcgaatccccaaggaacagtggtggctgaaactgaggcccatcctcaaaatcctagccaagtacgagattgacttggacacttcagaccatgcccacctggagcacatcacccggaagcggtccggggaagctgccgtctaa

SEQ ID NO: 853 - DNA, 3525 bp, Homo Sapiens
atgtacgacgcggatgaggatatgcaatatgatgaggatgatgatgaaatcaccccggatttgtggcaagaagcatgctggattgtaatcagttcctattttgacgagaaaggcttggttagacaacagctggattcttttgatgagtttattcagatgtctgttcaaagaattgtggaagacgctcctcctatagacctacaggctgaagctcagcatgctagtggagaagttgaagaaccgccacgatatttgctgaagtttgaacaaatttatctttccaagcctacccattgggaaagagatggtgctccttcaccaatgatgcccaatgaagctagattaaggaatctcacgtattctgctccgctttatgttgatataacaaaaacagtcattaaagaaggtgaagaacaacttcagactcagcatcagaaaacttttataggaaaaattccaattatgttgcggtcaacttactgccttttgaatggcttgacagatcgtgatctttgtgagttaaatgaatgccctttggatcctggtggctatttcattattaatggatcagaaaaggttctgattgcccaagagaaaatggcaacaaacacagtttatgtgtttgccaaaaaggattctaaatatgcctacacaggagagtgtagatcatgtcttgagaattcttcccgacccaccagtactatatgggttagcatgctggcaagaggaggacagggtgccaagaagagtgctattggtcagcgcattgtggcaactctaccatatatcaagcaagaagttcccatcattattgtgttcagagcattaggttttgtgtccgacagagatattttagaacatattatttatgattttgaagatccagagatgatggaaatggttaaaccttctctcgatgaagcttttgtcatccaagaacagaatgttgcactaaatttcattggttcacgaggagcaaagcctggtgttactaaagagaaaagaattaaatatgcaaaggaagttttacaaaaagaaatgctccctcatgttggtgtcagtgatttttgtgagaccaaaaaagcctatttcttgggatacatggttcataggttacttctggcagctttgggtagaagagaactagatgacagagatcactatggaaacaagagattggatcttgctgggccgctgcttgcattcttatttagaggtatgtttaagaatttgcttaaagaagtgcggatctatgcacagaaatttattgatcgaggaaaggattttaacttggagttggcaattaaaacacggatcatatctgatggcctaaaatactctttagctactggaaactggggtgatcaaaagaaagctcatcaagccagagctggagtatctcaggtgttaaaccgcctgacttttgcgtctactctttctcacctgcgtcgtttaaattctcctattggtagagacggcaagctagcaaaaccaagacagttgcataatacgttgtggggaatggtgtgtcctgccgagaccccagagggccatgctgtaggacttgtgaagaatttagccttgatggcgtatatttcagttggatctcaaccatctccaattctggaatttttagaagaatggagtatggaaaatttagaagaaatttctcctgcagctattgctgatgcaaccaagatttttgttaatggctgctgggttggaatacataaagatcccgaacaacttatgaacaccctaaggaaattgagacgtcagatggacatcattgtgtctgaagtttctatgatcagagatattcgagagagggagattcggatctatacggatgcaggccgtatttgtagaccacttctgattgtggaaaaacaaaagctacttttgaagaagaggcatattgaccaattgaaagagagagaatataacaactatagttggcaggatcttgtggccagtggggtagtggagtatattgataccctggaagaagaaacagtgatgcttgcaatgactccagatgatttacaggagaaagaagtagcttattgttccacatatacacactgtgagattcatccctcaatgatccttggtgtctgtgcatctattattccctttcctgatcataaccagtcccctagaaacacataccagtctgctatgggtaagcaggctatgggagtttacatcaccaacttccatgttcgcatggacacattggcccatgttctctattatcctcaaaagccacttgtgactacacggtctatggaatatctacgatttagagagctgccagcaggcatcaactcaattgtggccattgcatcatacactggatataatcaggaagactctgttatcatgaatcgttcagctgtagaccgcggcttcttcaggtctgttttctatcgctcatacaaagaacaggagtctaaaaaaggatttgatcaagaagaagtttttgagaagcctacacgtgaaacatgccagggcatgaggcatgccatttacgacaagctggatgatgatggtttgatagctccaggggttcgtgtatcaggagatgatgttattataggcaaaacagtcaccttgcctgaaaatgaagatgaattggagagcaccaatagacgctataccaagagagactgtagcacttttctcagaactagtgagacgggcattgtggatcaggttatggtaactctcaatcaggaaggatataaattttgtaaaataagggtacgctctgttaggattccacagattggagacaaatttgctagtcgacatggtcaaaagggtacttgtggtattcagtatagacaagaggatatgcctttcacctgtgaaggtatcacccctgatatcatcatcaatccccatgccatcccctctcgtatgactattggtcacttaattgaatgccttcaagggaaggtatcggctaacaagggtgaaattggtgatgccactccatttaatgatgctgttaacgtgcagaagatttctaatcttttatctgattatggctatcatctcagaggaaatgaggtcctgtacaatgggttcactggtcgaaaaatcacatcacaaatatttattggccccacttattaccagcgtttgaagcatatggtggatgataagattcactctcgtgctaggggacctattcagatcctcaatagacagcccatggagggtagatctcgtgatggtggcctgcgttttggagaaatggaacgagattgtcagattgcccatggagcagcccagtttttaagggaaagattgtttgaggcatcagatccatatcaggttcatgtttgcaatctttgtggaataatggcgattgccaacaccaggacccatacatatgaatgcaggggctgccgcaataaaacccagatttctttggtgcgaatgccttacgcatgcaaactattgtttcaggaacttatgtctatgagtattgcaccgcgaatgatgagtgtttag

SEQ ID NO: 854 - DNA, 1053 bp, Homo Sapiens
atgttcattaagggcagggctccgagggcgccacctcgagagcgacggcgggctacccggggcgggctgaggcaggttgtagccccgccccgggccttgggctccacctctcggccccacttccgccgggcaagcgtttgtaggcggcgctgccgtaaatcaggcggtctgcttgccgcatcacgcaagatggcggccgcggcggtgaacggggcggcaggcttctcgagctccgggcccgcggcaacctcgggcgctgttctgcaggccgcgaccggcatgtacgagcaactcaagggcgagtggaaccgtaaaagccccaatcttagcaagtgcggggaagagctgggtcgactcaagctagttcttctggagctcaacttcttgccaaccacagggaccaagctgaccaaacagcagctaattctggcccgtgacatactggagatcggggcccaatggagcatcctacgcaaggacatcccctccttcgagcgctacatggcccagctcaaatgctactactttgattacaaggagcagctccccgagtcagcctatatgcaccagctcttgggcctcaacctcctcttcctgctgtcccagaaccgggtggctgagttccacacggagttggagcggctgcctgccaaggacatacagaccaatgtctacatcaagcacccagtgtccctggagcaatacctgatggagggcagctacaacaaagtgttcctggccaagggtaacatccccgccgagagctacaccttcttcattgacatcctgctcgacactatcagggatgagatcgctgggtgcatcgagaaggcctacgagaaaatccttttcactgaggccacccggatcctcttcttcaacacacccaaaaagatgacagactacgccaagaagcgagggtgggtcctgggccccaacaactactacagttttgccagccagcagcagaagccggaagacaccaccattccctccacagaactggccaaacaggtcatcgagtatgcccggcagctggagatgatcgtctga

SEQ ID NO: 855 - DNA, 1413 bp, Homo Sapiens
atgactccaggtcttcagcacccacccaccgtggtacagcgccccgggatgccgtctggagcccggatgccccaccagggggcgcccatgggccccccgggctccccgtacatgggcagccccgccgtgcgacccggcctggcccccgcgggcatggagcccgcccgcaagcgagcagcgcccccgcccgggcagagccaggcacagagccagggccagccggtgcccaccgcccccgcgcggagccgcagtgccaagaggaggaagatggctgacaaaatcctccctcaaaggattcgggagctggtccccgagtcccaggcttacatggacctcttggcatttgagaggaaactggatcaaaccatcatgcggaagcgggtggacatccaggaggctctgaagaggcccatgaagcaaaagcggaagctgcgactctatatctccaacacttttaaccctgcgaagcctgatgctgaggattccgacggcagcattgcctcctgggagctacgggtggaggggaagctcctggatgatcccagcaaacagaagcggaagttctcttctttcttcaagagtttggtcatcgagctggacaaagatctttatggccctgacaaccacctcgttgagtggcatcggacacccacgacccaggagacggacggcttccaggtgaaacggcctggggacctgagtgtgcgctgcacgctgctcctcatgctggactaccagcctccccagttcaaactggatccccgcctagcccggctgctggggctgcacacacagagccgctcagccattgtccaggccctgtggcagtatgtgaagaccaacaggctgcaggactcccatgacaaggaatacatcaatggggacaagtatttccagcagatttttgattgtccccggctgaagttttctgagattccccagcgcctcacagccctgctattgccccctgacccaattgtcatcaaccatgtcatcagcgtggacccttcagaccagaagaagacggcgtgctatgacattgacgtggaggtggaggagccattaaaggggcagatgagcagcttcctcctatccacggccaaccagcaggagatcagtgctctggacagtaagatccatgagacgattgagtccataaaccagctcaagatccagagggacttcatgctaagcttctccagagaccccaaaggctatgtccaagacctgctccgctcccagagccgggacctcaaggtgatgacagatgtagccggcaaccctgaagaggagcgccgggctgagttctaccaccagccctggtcccaggaggccgtcagtcgctacttctactgcaagatccagcagcgcaggcaggagctggagcagtcgctggttgtgcgcaacacctag

SEQ ID NO: 856 - DNA, 900 bp, Homo Sapiens
atgatgggcaaggaagaggagattgcgcggatcgcccggaggctggacaagatggtgaccaagaagagcgcggagggagccatggatttgctgcgggagctgaaggccatgcctatcacgctgcacctgctccagtccacccgagtcgggatgtctgtcaacgcccttcggaagcagagctcggatgaggaggtcattgcactggccaagtctctcatcaagtcctggaagaagctcctggatgcttccgatgccaaagccagggagcgggggaggggcatgcctctgcccacgtcctcgagggatgcctcagaggccccggatcccagccgcaagaggccggagctgcccagggcaccgtcgactccgaggatcaccacatttcctccggtgcctgtcacctgtgatgccgtgcgcaacaagtgccgcgagatgctgaccgctgccctgcagacggaccatgaccacgtggccatcggtgcggactgcgagcgcctgtcggctcagatcgaggaatgcatcttccgggacgttggaaacacagacatgaagtataagaaccgtgtacggagtcgtatctccaacctgaaggatgccaagaaccctgacctgcggcggaatgtgctgtgtggggccataacaccccagcagatcgctgtgatgacctcagaggagatggccagtgatgagctgaaggagatccgtaaggccatgaccaaggaggccatccgagagcaccagatggcccgcactggcggcacgcagacagacctgttcacctgcggcaagtgcaggaaaaagaactgcacctacacacaggtgcagacccgcagctctgatgagcccatgaccacctttgttgtctgcaacgagtgtggaaaccgctggaagttctgctga

SEQ ID NO: 857 - DNA, 1638 bp, Homo Sapiens
atgatgggccatcgtccagtgctcgtgctcagccagaacacaaagcgtgaatccggaagaaaagttcaatctggaaacatcaatgctgccaagactattgcagatatcatccgaacatgtttgggacccaagtccatgatgaagatgcttttggacccaatgggaggcattgtgatgaccaatgatggcaatgccattcttcgagagattcaagtccagcatccagcggccaagtccatgatcgaaattagccggacccaggatgaagaggttggagatgggaccacatcagtaattattcttgcaggggaaatgctgtctgtagctgagcacttcctggagcagcagatgcacccaacagtggtgatcagtgcttaccgcaaggcattggatgatatgatcagcaccctaaagaaaataagtatcccagtcgacatcagtgacagtgatatgatgctgaacatcatcaacagctctattactaccaaagccatcagtcggtggtcatctttggcttgcaacattgccctggatgctgtcaagatggtacagtttgaggagaatggtcggaaagagattgacataaaaaaatatgcaagagtggaaaagatacctggaggcatcattgaagactcctgtgtcttgcgtggagtcatgattaacaaggatgtgacccatccacgtatgcggcgctatatcaagaaccctcgcattgtgctgctggattcttctctggaatacaagaaaggagaaagccagactgacattgagattacacgagaggaggacttcacccgaattctccagatggaggaagagtacatccagcagctctgtgaggacattatccaactgaagcccgatgtggtcatcactgaaaagggcatctcagatttagctcagcactaccttatgcgggccaatatcacagccatccgcagagtccggaagacagacaataatcgcattgctagagcctgtggggcccggatagtcagccgaccagaggaactgagagaagatgatgttggaacaggagcaggcctgttggaaatcaagaaaattggagatgaatactttactttcatcactgactgcaaagaccccaaggcctgcaccattctcctccggggggctagcaaagagattctctcggaagtagaacgcaacctccaggatgccatgcaagtgtgtcgcaatgttctcctggaccctcagctggtgccagggggtggggcctccgagatggctgtggcccatgccttgacagaaaaatccaaggccatgactggtgtggaacaatggccatacagggctgttgcccaggccctagaggtcattcctcgtaccctgatccagaactgtggggccagcaccatccgtctacttacctcccttcgggccaagcacacccaggagaactgtgagacctggggtgtaaatggtgagacgggtactttggtggacatgaaggaactgggcatatgggagccattggctgtgaagctgcagacttataagacagcagtggagacggcagttctgctactgcgaattgatgacatcgtttcaggccacaaaaagaaaggcgatgaccagagccggcaaggcggggctcctgatgctggccaggagtga

SEQ ID NO: 858 - DNA, 2574 bp, Homo Sapiens
atggcgaaggcgaagaaggtcggggcgcgaaggaaggcctccggggcgccggcgggagcgcgagggggcccggcgaaggccaactccaatccgttcgaggtgaaagttaacaggcagaagttccagatcctgggccggaagacgcgccacgacgtgggactgcccggggtgtctcgcgcacgggccctcaggaagcgtacacagactttactaaaagagtacaaagaaagggataaatccaatgtattcagagataaacgcttcggagaatacaacagcaacatgagccccgaggagaagatgatgaagaggtttgctctggaacagcagcgacatcatgagaaaaaaagcatctacaatctaaatgaagatgaagaattgactcattatggccagtctttggcagacatcgagaagcataatgacattgtggacagtgacagcgatgctgaggatcgaggaacgttgtctgctgagctgactgctgcccactttggaggaggcggtgggctccttcacaagaagactcaacaggaaggcgaggagcgggagaaaccgaagtcccggaaagagctgattgaagagctcattgccaagtcaaaacaagagaagagggagagacaagctcaacgagaagatgccctcgagctcacggagaagctagaccaagactggaaagaaattcagactctcctgtcccacaaaactcccaagtcagagaacagagacaaaaaggaaaaacccaagcccgatgcatatgacatgatggttcgcgagcttggctttgaaatgaaggcgcagccctctaacaggatgaagacggaggcagaattggcaaaggaagagcaggagcacctcaggaagctggaggctgagagacttcgaagaatgcttggaaaggatgaggatgaaaatgttaagaaaccaaaacatatgtcagcagatgatctgaatgatggcttcgtgctagataaagatgacaggcgtttgctttcctacaaagatggaaagatgaatgtcgaggaagatgtccaggaagagcaaagcaaggaagccagtgaccctgagagcaacgaggaagaaggtgacagttcaggcggggaggacacagaggagagcgacagcccagatagccacttggacctggaatccaacgtggagagtgaggaagaaaacgagaagccagcaaaagagcagaggcagactcctgggaaagggttgataagcggcaaggaaagagctggaaaagctaccagagacgagctgccctacacgttcgcagcccctgaatcctatgaggaactgagatctctgttgttaggaagatcgatggaagagcagcttttggtggtggagagaattcagaagtgcaaccacccgagtctcgcagaaggaaacaaagcaaaattagaaaaactgtttggctttcttttggaatacgttggcgatttggctacagatgacccaccagacctcacagtcattgataagttggttgtgcacttatatcatctttgccagatgtttcctgaatctgcaagtgacgctatcaaatttgttctccgagatgcgatgcatgagatggaagaaatgattgagaccaaaggccgggcggcattgccagggttggatgtgctcatttatttgaaaatcactgggctgctatttccaacttccgacttctggcacccagtggtgacccctgccctcgtgtgcctcagtcagctgctcaccaagtgccccatcctgtccctccaggacgtggtgaagggcctgttcgtgtgctgcctgttcctggagtatgtggctttgtcccagaggtttatacctgagcttattaattttcttcttgggattctttacatagcaactccaaacaaagcaagccaaggttccactctggtgcaccctttcagagcgcttgggaagaactcggaactgctcgtggtgtctgctagagaggatgtggccacgtggcagcagagcagcctctccctccgctgggcgagtagactgagggccccaacttcgacagaggccaatcacatccgactgtcctgcctggctgtgggcctggccctgctgaagcgctgcgtgctcatgtacgggtccctgccatccttccacgccatcatggggcctctccaagccctcctcacggatcacctggcggactgcagccacccgcaggagctccaggagctgtgtcagagcacactgaccgaaatggaaagccagaagcagctctgccggccgctgacctgtgagaagagcaagcctgtcccactgaagcttttcacaccccggctggtcaaagtcctcgagtttggaagaaaacaaggcagtagtaaggaggaacaggaaaggaagaggctgatccacaaacacaagcgtgaatttaaaggggccgttcgagaaatccgcaaggacaatcagttcctggcgaggatgcaactctcagaaatcatggaacgggatgcggaaagaaagcggaaagtaaagcagctttttaacagcctggctacacaggaaggcgaatggaaggctctgaagaggaaaaagttcaaaaaataa

SEQ ID NO: 859 - DNA, 1482 bp, Homo Sapiens
atgctgggcaaggattacatgctggccatcattctggtcaactgcgatgatgacttgtggggggaccacagtctggaggtggaggctggcctgcctcctggctggaggaagatccacgatgctgcaggtacttactactggcatgtacccagcggtagcacccagtggcagcgcccaacctgggaactaggagatgcagaggacccaggcacgggaacggaggggatctggggactgcggccccccaaagggagatccttctccagcctggagagttcactggaccggagtaactctctgtcctggtatggtggggaatcctacatccagagcatggagccaggggctaagtgctttgcagtccgctctctgggctgggtagaggtacctgaagaggacctggcaccggggaagagcagtattgcagtcaataactgtatccagcagctggcccagacccgcagccggagccagcctccagatggtgcctggggtgagggccagaacatgctgatgatcctgaagaaggatgccatgagcctagtgaatcccctggaccacagtctgatccactgccagcctctggtgcacatccgtgtgtggggcgtggggagctccaagggccgtgacagccccatctctgcccctgctagggacttcgcttttgtggcaagtgacaaagatagctgtatgctcaagtgccatgtgttttgctgtgatgtccctgccaaggccattgccagtgccctacatgggctttgtgcccagatcttgtcagagcgagtagaggtcagtggtgatgcctcttgctgctccccagaccccatctctcctgaagacctgccacggcaagtggagctgctggatgcggtaagccaagctgctcagaagtacgaggcactgtatatggggacactgccagtcaccaaggccatgggcatggatgtgctgaacgaggccattggtaccctcaccgccaggggggaccggaatgcctgggtccccaccatgctcagtgtgtctgactctctcatgactgcacaccccattcaggcagaggccagtacagaggaggagccattgtggcagtgccctgtgcgccttgtgacatttattggtgttggccgcgacccacacacctttggcctcatcgctgacctgggccgtcagagcttccagtgcgcagccttctggtgccagccccatgcagggggactctctgaagctgtgcaggctgcctgtatggttcagtaccagaagtgtcttgtggcctctgcagctcgaggcaaggcctggggtgcccaggcccgtgcccgcctgcggctcaagcggaccagctccatggattccccaggaggtcccctgcccctccccctgctcaaaggaggggttggcggtgcaggggcaacccctcgaaagcggggtgtcttctcttttcttgatgccttccggctgaaaccctctctgctccatatgccctaa

SEQ ID NO: 860 - DNA, 450 bp, Homo Sapiens
atgcggtacaacgagaaggagctgcaggctctgtcccggcagccggccgagatggcggccgagctgggcatgaggggccccaagaagggcagcgtgctgaagcggcggctggtgaagctggtggtgaatttcctcttctactttcggacagacgaggccgagcccgtcggagccctgctgctggagcgctgcagagtcgtccgggaagagcccggcaccttctccatcagcttcattgaggaccctgagaggaagtatcactttgagtgcagcagcgaggagcagtgtcaggagtggatggaggctctgcgtcgggccagctacgagttcatgcggagaagcctcatcttctacaggaacgaaatccggaaggtgacgggcaaggaccccctggaacagttcggcatatccgaggaggccaggttccagctgagtggcttgcaggcgtga

SEQ ID NO: 861 - DNA, 1215 bp, Homo Sapiens
atggaggccggagaggaaccgctgctgctggccgaactcaagcccgggcgcccccaccagtttgattggaagtccagctgtgaaacctggagcgtcgccttctccccagatggctcctggtttgcttggtctcaaggacactgcatcgtcaaactgatcccctggccgttggaggagcagttcatccctaaagggtttgaagccaaaagccgaagtagcaaaaatgagacgaaagggcggggcagcccaaaagagaagacgctggactgtggtcagattgtctgggggctggccttcagcccgtggccttccccacccagcaggaagctctgggcacgccaccacccccaagtgcccgatgtctcttgcctggttcttgctacgggactcaacgatgggcagatcaagatctgggaggtgcagacagggctcctgcttttgaatctttccggccaccaagatgtcgtgagagatctgagcttcacacccagtggcagtttgattttggtctccgcgtcacgggataagactcttcgcatctgggacctgaataaacacggtaaacagattcaagtgttatcgggccacctgcagtgggtttactgctgttccatctccccagactgcagcatgctgtgctctgcagctggagagaagtcggtctttctatggagcatgaggtcctacacgttaattcggaagctagagggccatcaaagcagtgttgtctcttgtgacttctcccccgactctgccctgcttgtcacggcttcttacgataccaatgtgattatgtgggacccctacaccggcgaaaggctgaggtcactccaccacacccaggttgaccccgccatggatgacagtgacgtccacattagctcactgagatctgtgtgcttctctccagaaggcttgtaccttgccacggtggcagatgacagactcctcaggatctgggccctggaactgaaaactcccattgcatttgctcctatgaccaatgggctttgctgcacattttttccacatggtggagtcattgccacagggacaagagatggccacgtccagttctggacagctcctagggtcctgtcctcactgaagcacttatgccggaaagcccttcgaagtttcctaacaacttaccaagtcctagcactgccaatccccaagaaaatgaaagagttcctcacatacaggactttttaa

SEQ ID NO: 862 - DNA, 1659 bp, Homo Sapiens
atgttggaccacaaggacttagaggccgaaatccaccccttgaaaaatgaagaaagaaaatcgcaggaaaatctgggaaatccatcaaaaaatgaggataacgtgaaaagcgcgcctccacagtcccggctctcccggtgccgagcggcggcgttttttctttcattgtttctctgcctttttgtggtgttcgtcgtctcattcgtcatcccgtgtccagaccggccggcgtcacagcgaatgtggaggatagactacagtgccgctgttatctatgactttctggctgtggatgatataaacggggacaggatccaagatgttctttttctttataaaaacaccaacagcagcaacaatttcagccgatcctgtgtggacgaaggcttttcctctccctgcacctttgcagctgctgtgtcgggggccaacggcagcacgctctgggagagacctgtggcccaagacgtggccctcgtggagtgtgctgtgccccagccaagaggcagtgaggcaccttctgcctgcatcctggtgggcagacccagttctttcattgcagtcaacttgttcacaggggaaaccctgtggaaccacagcagcagcttcagcgggaatgcgtccatcctgagccctctgctgcaggtgcctgatgtggacggcgatggggccccagacctgctggttctcacccaggagcgggaggaggttagtggccacctctactccggcagcaccgggcaccagattggcctcagaggcagccttggtgtggacggggaaagtggcttcctccttcacgtcaccaggacaggtgcccactacatcctctttccctgcgcaagctccctctgcggctgctctgtgaagggtctctacgagaaggtgaccgggagcggcggcccgttcaagagtgacccgcactgggagagcatgctcaatgccaccacccgcaggatgctttcccacagctctggagcagtgcgctacctgatgcatgtcccagggaacgccggtgcagatgtgcttcttgtgggctcagaggccttcgtgctgctggacgggcaggagctgacgcctcgctggacacccaaggcagcccatgtcctgagaaaacccatcttcggccgctacaaaccagacaccttggctgtagccgttgaaaacggaactggcaccgacagacagatcctgtttctggaccttggcactggagccgtcctgtgtagcctagccctcccgagcctccctgggggtccactgtccgccagcctgccgaccgcagaccaccgctcagccttcttcttctggggcctccacgagctggggagcaccagcgagacggagaccggggaggcccggcacagcctgtacatgttccaccccaccctgccgcgcgtgctgctggagctggccaatgtctctacccacattgtcgcctttgacgccgtcctgtttgagccaagccgccacgccgcctacatccttctgacaggcccggcagactcagaggcacccggcctggtctctgtgatcaagcacaaggtgcgggaccttgtcccaagcagcagggtggtccgcctgggtgagggtgggccagacagtgaccaagccatcagggaccggttctcccggctgcggtaccagagtgaggcgtag

SEQ ID NO: 863 - DNA, 543 bp, Homo Sapiens
atggcggcgcttgacctgcgagcggagctggattcgctggtcctgcagctgcttggggacctggaggagctggaggggaaacgaacggtgttgaacgcccgggtggaggagggctggctctcgctcgccaaggctcgctacgcgatgggcgccaagtcggtagggcccctgcagtatgcttcccacatggagccccaggtctgcctccacgccagcgaggcccaggagggactccagaagttcaaggtggtgagagctggtgtccacgccccagaggaggtggggcctcgcgaagcaggtctgcggaggcgcaagggccccactaagaccccagaaccggagtcctctgaggcccctcaggaccccctgaactggtttggaatcctagttcctcacagtctacgtcaggctcaagcaagcttccgggatggcctgcagctggccgcagacatagccagcctccagaaccgcattgactggggtcgaagccagctccggggactccaagagaaactcaagcagctggagcctggggctgcctga

SEQ ID NO: 864 - DNA, 465 bp, Homo Sapiens
atggctgccgcctgggggtcgtccctaacggccgcgacgcagagagcggtcactccctggccgaggggcaggctcctcacggcctccctgggaccccaggcgcgtcgggaggcgtcgtcctccagccccgaggccggcgaagggcagatccgcctcacagacagttgcgtccagaggcttttggaaatcaccgaagggtcagaattcctcaggctgcaagtggagggaggtggatgctccggattccaatacaaattttcactggatacagttatcaaccccgacgacagggtatttgaacagggtggggcaagagtggtggttgactctgatagcttggccttcgtgaaaggggcccaggtggacttcagccaagaactgatccgaagctcatttcaagtgttgaacaatcctcaagcacagcaaggctgctcctgtgggtcatctttctctatcaaactttga

SEQ ID NO: 865 - DNA, 2724 bp, Homo Sapiens
gtggagagtgcgattgcagaagggggtgcttctcgtttcagtgcttcttcgggcggaggaggaagtaggggtgcacctcagcactatcccaagactgctggcaacagcgagttcctggggaaaaccccagggcaaaacgctcagaaatggattcctgcacgaagcactagacgagatgacaactccgcagcaaacaactccgcaaacgaaaaagaacgacatgatgcaatcttcaggaaagtaagaggcatactaaataagcttactcctgaaaagtttgacaagctatgccttgagctcctcaatgtgggtgtagagtctaaactcatccttaaaggggtcatactgctgattgtggacaaagccctagaagagccaaagtatagctcactgtatgctcagctatgtctgcgattggcagaagatgcaccaaactttgatggcccagcagcagagggtcaaccaggacagaagcaaagcaccacattcagacgcctcctaatttccaaattacaagatgaatttgaaaaccgaactagaaatgttgatgtctatgataagcgtgaaaatcccctcctccccgaggaggaggaacagagagccattgctaagatcaagatgttgggaaacatcaaattcattggagagcttggcaagcttgatcttattcacgaatctatccttcataagtgcatcaaaacacttttggaaaagaagaagagagtccaactcaaagatatgggagaggatttggagtgcctctgtcagataatgaggacagtgggacctagattagaccatgaacgagccaagtccttaatggatcagtactttgcccgaatgtgctccttgatgttaagtaaggaattgccagcaaggattcgtttcctgctgcaggataccgtagagttgcgagaacaccattgggttcctcgcaaggcttttcttgacaatggaccaaagacgatcaatcaaattcgtcaagatgcagtaaaagatctaggggtgtttattcctgctcctatggctcaagggatgagaagtgacttctttctggagggaccgttcatgccacccaggatgaaaatggatagggacccacttggaggacttgctgatatgtttggacaaatgccaggtagcggaattggtactggtccaggagttatccaggatagattttcacccaccatgggacgtcatcgttcaaatcaactcttcaatggccatgggggacacatcatgcctcccacacaatcgcagtttggagagatgggaggcaagtttatgaaaagccaggggctaagccagctctaccataaccagagtcagggactcttatcccagctgcaaggacagtcgaaggatatgccacctcggttttctaagaaaggacagcttaatgcagatgagattagcctgaggcctgctcagtcgttcctaatgaataaaaatcaagtgccaaagcttcagccccagataactatgattcctcctagtgcacaaccaccacgcactcaaacaccacctctgggacagacacctcagcttggtctcaaaactaatccaccgcttatccaggaaaagcctgccaagaccagcaaaaagccaccaccgtcaaaggaagaactccttaaactaactgaaactgttgtgactgaatatctaaatagtggaaatgcaaatgaggctgtcaatggtgtaagagaaatgagggctcctaaacactttcttcctgagatgttaagcaaagtaatcatcctgtcactagatagaagcgatgaagataaagaaaaagcaagttctttgatcagtttactcaaacaggaagggatagccacaagtgacaacttcatgcaggctttcctgaatgtattggaccagtgtcccaaactggaggttgacatccctttggtgaaatcctatttagcacagtttgcagctcgtgccatcatttcagagctggtgagcatttcagaactagctcaaccactagaaagtggcacccattttcctctcttcctactttgtcttcagcagttagctaaattacaagatcgagaatggttaacagaactttttcaacaaagcaaggtcaatatgcagaaaatgctcccagaaattgatcagaataaggaccgcatgttggagattttggaaggaaagggactgagtttcttattcccactcctcaaattggagaaggaactgttgaagcaaataaagttggatccatcccctcaaaccatatataaatggattaaagataacatctctcccaaacttcatgtagataaaggatttgtgaacatcttaatgactagcttcttacagtacatttctagtgaagtaaacccccccagcgatgaaacagattcatcctctgctccttccaaagaacagttagagcaggaaaaacaactactactatctttcaagccagtaatgcagaaatttcttcatgatcacgttgatctacaagtcagtgccctgtatgctctccaggtgcactgctataacagcaacttcccaaaaggcatgttacttcgcttttttgtgcacttctatgacatggaaattattgaagaagaagctttcttggcttggaaagaagatataacccaagagtttccgggaaaaggcaaggctttgttccaggtgaatcagtggctaacctggttagaaactgctgaagaagaagaatcagaggaagaagctgactaa

SEQ ID NO: 866 - DNA, 894 bp, Homo Sapiens
atggcttcgccgcagctctgccgcgcgctggtgtcggcgcaatgggtggcggaggcgctgcgggccccgcgcgctgggcagcctctgcagctgctggacgcctcctggtacctgccgaagctggggcgcgacgcgcgacgcgagttcgaggagcgccacatcccgggcgccgctttcttcgacatcgaccagtgcagcgaccgcacctcgccctacgaccacatgctgcccggggccgagcatttcgcggagtacgcaggccgcctgggcgtgggcgcggccacccacgtcgtgatctacgacgccagcgaccagggcctctactccgccccgcgcgtctggtggatgttccgcgccttcggccaccacgccgtgtcactgcttgatggcggcctccgccactggctgcgccagaacctcccgctcagctccggcaagagccaacctgctcccgccgagttccgcgctcagctcgaccccgccttcatcaagacctacgaggacatcaaggagaacctggaatcccggcgcttccaggtggtggactcccgagccactggcaggttccgcggcaccgagcccgagccccgagacggcattgaacctggccacatcccaggtaccgtgaacatccccttcacagacttcctgagccaggaggggctggagaagagccctgaggagatccgccatctgttccaggagaagaaagtggacctgtctaagccactggtggccacgtgtggctctggcgtcacagcctgccacgtggcactaggggcctacctctgcggcaagccagacgtgcccatctacgatggctcctgggtggagtggtacatgcgcgcccggcccgaggatgtcatctcagagggccgggggaagacccactga

SEQ ID NO: 867 - DNA, 1134 bp, Homo Sapiens
atggcggctgccgcacaatcccgggttgtccgggtcctgtcaatgtcacgttctgccattactgcaatagccacatctgtgtgtcacggcccaccctgtcgccagcttcatcatgccctcatgcctcatgggaaaggtggacgttcctcagtcagtgggattgtggccactgtgtttggagcaacaggattcctggggcgatatgttgtcaaccaccttggacgcatggggtcacaggtaatcataccctatcggtgtgataaatatgacatcatgcaccttcgtcccatgggtgacctgggccagcttctgtttctggaatgggacgcgagagataaagattctatccgacgagtagtacaacacagcaatgtggtcatcaatcttattggacgagactgggaaaccaaaaactttgattttgaggatgtttttgtgaagattccccaagcaattgctcaactgtccaaggaagctggagttgaaaaattcattcatgtttcacatctgaatgcgaatattaaaagctcttctagatatttgagaaataaggctgttggagagaaagtagtgagagatgcatttccggaagccattatcgtaaagccgtcggacatctttggaagagaggatagattccttaattcttttgcaagtatgcatcggtttggtcctataccccttggttccttgggctggaagacagttaaacaaccagtatatgtcgtagatgtatccaaaggaattgttaatgcagttaaggatcctgatgccaatgggaaatcctttgctttcgttggtcccagtcggtacctccttttccacctggtgaagtacatctttgctgtggctcacagattgttcctcccattccccttgccgctttttgcctatcgatgggtagcaagagtctttgaaataagcccatttgagccctggataacaagggataaagtggagcggatgcacatcacagacatgaaattgcctcacctgcctggcttagaagaccttggtattcaggcaacaccactggaactcaaggccattgaggtgctgcggcgtcatcgcacttaccgctggctgtctgctgaaattgaggatgtgaagccggccaagaccgtcaacatttag

SEQ ID NO: 868 - DNA, 3537 bp, Homo Sapiens
atgctgaagttccgaacagtccatgggggcctgaggctcctgggaatccgccgaacctccaccgcccccgctgcctccccaaatgtccggcgcctggagtataagcccatcaagaaagtcatggtggccaacagaggtgagattgccatccgtgtgttccgggcctgcacggagctgggcatccgcaccgtagccatctactctgagcaggacacgggccagatgcaccggcagaaagcagatgaagcctatctcatcggccgcggcctggcccccgtgcaggcctacctgcacatcccagacatcatcaaggtggccaaggagaacaacgtagatgcagtgcaccctggctacgggttcctctctgagcgagcggacttcgcccaggcctgccaggatgcaggggtccggtttattgggccaagcccagaagtggtccgcaagatgggagacaaggtggaggcccgggccatcgccattgctgcgggtgttcccgttgtccctggcacagatgcccccatcacgtccctgcatgaggcccacgagttctccaacacctacggcttccccatcatcttcaaggcggcctatgggggtggagggcgtggcatgagggtggtgcacagctacgaggagctggaggagaattacacccgggcctactcagaggctctggccgcctttgggaatggggcgctgtttgtggagaagttcatcgagaagccacggcacatcgaggtgcagatcttgggggaccagtatgggaacatcctgcacctgtacgagcgagactgctccatccagcggcggcaccagaaggtggtcgagattgcccccgccgcccacctggacccgcagcttcggactcggctcaccagcgactctgtgaaactcgctaaacaggtgggctacgagaacgcaggcaccgtggagttcctggtggacaggcacggcaagcactacttcatcgaggtcaactcccgcctgcaggtggagcacacggtcacagaggagatcaccgacgtagacctggtccatgctcagatccacgtggctgagggcaggagcctacccgacctgggcctgcggcaggagaacatccgcatcaacgggtgtgccatccagtgccgggtcaccaccgaggaccccgcgcgcagcttccagccggacaccggccgcattgaggtgttccggagcggagagggcatgggcatccgcctggataatgcttccgccttccaaggagccgtcatctcgccccactacgactccctgctggtcaaagtcattgcccacggcaaagaccaccccacggccgccaccaagatgagcagggcccttgcggagttccgcgtccgaggtgtgaagaccaacatcgccttcctgcagaatgtgctcaacaaccagcagttcctggcaggcactgtggacacccagttcatcgacgagaacccagagctgttccagctgcggcctgcacagaaccgggcccaaaagctgttgcactacctcggccatgtcatggtaaacggtccaaccaccccgattcccgtcaaggccagccccagccccacggaccccgttgtccctgcagtgcccataggcccgcccccggctggtttcagagacatcctgctgcgagaggggcctgagggctttgctcgagctgtgcggaaccacccggggctgctgctgatggacacgaccttcagggacgcccaccagtcactgctggccactcgtgtgcgcacccacgatctcaaaaagatcgccccctatgttgcccacaacttcagcaagctcttcagcatggagaactggggaggagccacgtttgacgtcgccatgcgcttcctgtatgagtgcccctggcggcggctgcaggagctccgggagctcatccccaacatccctttccagatgctgctgcggggggccaatgctgtgggctacaccaactacccagacaacgtggtcttcaagttctgtgaagtggccaaagagaatggcatggatgtcttccgtgtgtttgactccctcaactacttgcccaacatgctgctgggcatggaggcggcaggaagtgccggaggcgtggtggaggctgccatctcatacacgggcgacgtggccgaccccagccgcaccaagtactcactgcagtactacatgggcttggccgaagagctggtgcgagctggcacccacatcctgtgcatcaaggacatggccgggctgctgaagcccacggcctgcaccatgctggtcagctccctccgggaccgcttccccgacctcccactgcacatccacacccacgacacgtcaggggcaggcgtggcagccatgctggcctgtgcccaggctggagctgatgtggtggatgtggcagctgattccatgtctgggatgacttcacagcccagcatgggggccctggtggcctgtaccagagggactcccctggacacagaggtgcccatggagcgcgtgtttgactacagtgagtactgggagggggctcggggactgtacgcggccttcgactgcacggccaccatgaagtctggcaactcggacgtgtatgaaaatgagatcccagggggccagtacaccaacctgcacttccaggcccacagcatggggcttggctccaagttcaaggaggtcaagaaggcctatgtggaggccaaccagatgctgggcgatctcatcaaggtgacgccctcctccaagatcgtgggggacctggcccagtttatggtgcagaatggattgagccgggcagaggccgaagctcaggcggaagagctgtcctttccccgctccgtggtggagttcctgcagggctacatcggtgtcccccatggggggttccccgaaccctttcgctctaaggtactgaaggacctgccaagggtggaggggcggcctggagcctccctccctcccctggatctgcaggcactggagaaggagctggtagaccggcatggggaggaggtgacgccggaagatgtgctctcagcagctatgtaccccgatgtgtttgcccacttcaaggacttcactgccacctttggccccctggatagcctgaatactcgcctcttcctgcagggacccaagatcgcagaggagtttgaggtggagctggagcggggcaagacgctgcacatcaaagccctggccgtgagcgacctgaaccgggccggccagaggcaggtcttctttgagctcaatgggcagctgcggtccatcttggtcaaggacacccaggccatgaaggagatgcacttccaccccaaggccctaaaggacgtgaagggccagatcggggcgcccatgcctgggaaggtgatagacatcaaagtggtggcaggggccaaggtggccaagggccagcccctgtgtgtgctcagtgccatgaagatggagactgtggtgacctcacccatggagggtactgtccgcaaggttcatgtgaccaaggacatgacactggaaggtgacgacctcatcctggagatcgagtga

SEQ ID NO: 869 - DNA, 1995 bp, Homo Sapiens
atgtcgggggtccggggcctgtcgcggctgctgagcgctcggcgcctggcgctggccaaggcgtggccaacagtgttgcaaacaggaacccgaggttttcacttcactgttgatgggaacaagagggcatctgctaaagtttcagattccatttctgctcagtatccagtagtggatcatgaatttgatgcagtggtggtaggcgctggaggggcaggcttgcgagctgcatttggcctttctgaggcagggtttaatacagcatgtgttaccaagctgtttcctaccaggtcacacactgttgcagcacagggaggaatcaatgctgctctggggaacatggaggaggacaactggaggtggcatttctacgacaccgtgaagggctccgactggctgggggaccaggatgccatccactacatgacggagcaggcccccgccgccgtggtcgagctagaaaattatggcatgccgtttagcagaactgaagatgggaagatttatcagcgtgcatttggtggacagagcctcaagtttggaaagggcgggcaggcccatcggtgctgctgtgtggctgatcggactggccactcgctattgcacaccttatatggaaggtctctgcgatatgataccagctattttgtggagtattttgccttggatctcctgatggagaatggggagtgccgtggtgtcatcgcactgtgcatagaggacgggtccatccatcgcataagagcaaagaacactgttgttgccacaggaggctacgggcgcacctacttcagctgcacgtctgcccacaccagcactggcgacggcacggccatgatcaccagggcaggccttccttgccaggacctagagtttgttcagttccaccctacaggcatatatggtgctggttgtctcattacggaaggatgtcgtggagagggaggcattctcattaacagtcaaggcgaaaggtttatggagcgatacgcccctgtcgcgaaggacctggcgtctagagatgtggtgtctcggtccatgactctggagatccgagaaggaagaggctgtggccctgagaaagatcacgtctacctgcagctgcaccacctacctccagagcagctggccacgcgcctgcctggcatttcagagacagccatgatcttcgctggcgtggacgtcacgaaggagccgatccctgtcctccccaccgtgcattataacatgggcggcattcccaccaactacaaggggcaggtcctgaggcacgtgaatggccaggatcagattgtgcccggcctgtacgcctgtggggaggccgcctgtgcctcggtacatggtgccaaccgcctcggggcaaactcgctcttggacctggttgtctttggtcgggcatgtgccctgagcatcgaagagtcatgcaggcctggagataaagtccctccaattaaaccaaacgctggggaagaatctgtcatgaatcttgacaaattgagatttgctgatggaagcataagaacatcggaactgcgactcagcatgcagaagtcaatgcaaaatcatgctgccgtgttccgtgtgggaagcgtgttgcaagaaggttgtgggaaaatcagcaagctctatggagacctaaagcacctgaagacgttcgaccggggaatggtctggaacacggacctggtggagaccctggagctgcagaacctgatgctgtgtgcgctgcagaccatctacggagcagaggcacggaaggagtcacggggcgcgcatgccagggaagactacaaggtgcggattgatgagtacgattactccaagcccatccaggggcaacagaagaagccctttgaggagcactggaggaagcacaccctgtcctatgtggacgttggcactgggaaggtcactctggaatatagacccgtgatcgacaaaactttgaacgaggctgactgtgccaccgtcccgccagccattcgctcctactga

SEQ ID NO: 870 - DNA, 519 bp, Homo Sapiens
atgagcagctcaggtggggcgcccggggcgtccgccagctctgcgccgcccgcgcaggaagagggcatgacgtggtggtaccgctggctgtgtcgcctgtctggggtgctgggggcagtctcttgcgcgatctctggcctcttcaactgcatcaccatccaccctctgaacattgcggccggcgtgtggatgatcatgaatgccttcatcttgttgctgtgtgaggcgcccttctgctgccagttcatcgagtttgcaaacacagtggcggagaaggtggaccggctgcgctcctggcagaaggctgtcttctactgcgggatggcggtcgttcccatcgtcatcagcctgaccctgaccacgctgctgggcaacgccatcgcctttgctacgggggtgctgtacggactctctgctctgggcaaaaagggcgatgcgatctcctatgccaggatccagcagcagaggcagcaggcggatgaggagaagctcgcggagaccctggagggggagctgtga

SEQ ID NO: 871 - DNA, 1857 bp, Homo Sapiens
atggagctgctggccgctgccttcagcgccgcctgcgccgtggaccacgacagttccacctcggaaagcgacgcgcgcgactcggcggcgggacacctgcccggcagtgagtcgtcctccaccccgggaaatggggccacgcccgaggagtggccggccctggccgacagccccaccacgctcaccgaggccctgcggatgatccaccccattcccgccgactcctggagaaacctcattgaacaaatagggctcctgtatcaggaataccgagataaatcgactctccaagaaatcgaaaccaggaggcaacaggatgcagaaatagaagacaataccaatgggtccccggccagtgaggacaccccggaggaggaagaagaagaggaggaggaggaggagccggccagcccaccagagaggaagactctgccccagatctgcctgctcagtaacccccactcaaggttcaacctctggcaggatcttcccgagatccggagcagcggggtgcttgagatcctacagcccgaggagattaagctgcaggaggccatgttcgagctggtcacttccgaggcgtcctactacaagagtctgaacctgctcgtgtcccacttcatggagaacgagcggataaggaagatcctgcacccgtccgaggcgcacatcctcttctccaacgtcctggacgtgctggctgtcagtgagcggttcctcctggagctggagcaccggatggaggagaacatcgtcatctctgacgtgtgtgacattgtgtaccgttatgcggccgaccacttctctgtctacatcacctacgtcagcaatcagacctaccaggagcggacctataagcagctgctccaggagaaggcagctttccgggagctgatcgcgcagctagagctcgaccccaagtgcagggggctgcccttctcctccttcctcatcctgcctttccagaggatcacacgcctcaagctgttggtccagaacatcctgaagagggtagaagagaggtctgagcgggagtgcactgctttggatgctcacaaggagctggaaatggtggtgaaggcatgcaacgagggcgtcaggaaaatgagccgcacggaacagatgatcagcattcagaagaagatggagttcaagatcaagtcggtgcccatcatctcccactcccgctggctgctgaagcagggtgagctgcagcagatgtcaggccccaagacctcccggaccctgaggaccaagaagctcttccacgaaatttacctcttcctgttcaacgacctgctggtgatctgccggcagattccaggagacaagtaccaggtatttgactcagctccgcggggactgctgcgtgtggaggagctggaggaccagggccagacgctggccaacgtgttcatcctgcggctgctggagaacgcagatgaccgggaggccacctacatgctaaaggcgtcctctcagagtgagatgaagcgttggatgacctcactggcccccaacaggaggaccaagtttgtttcgttcacatcccggctgctggactgcccccaggtccagtgcgtgcacccatacgtggctcagcagccagacgagctgacgctggagctcgccgacatcctcaacatcctggacaagactgacgacgggtggatctttggcgagcgtctgcacgaccaggagagaggctggttccccagctccatgactgaggagatcttgaatcccaagatccggtcccagaacctcaaggaatgtttccgtgtccacaagatggatgaccctcagcgcagccagaacaaggaccgcaggaagctgggcagccggaatcggcaatga

SEQ ID NO: 872 - DNA, 681 bp, Homo Sapiens
atggagactgtggtgattgttgccataggtgtgctggccaccatctttctggcttcgtttgcagccttggtgctggtttgcaggcagcgctactgccggccgcgagacctgctgcagcgctatgattctaagcccattgtggacctcattggtgccatggagacccagtctgagccctctgagttagaactggacgatgtcgttatcaccaacccccacattgaggccattctggagaatgaagactggatcgaagatgcctcgggtctcatgtcccactgcattgccatcttgaagatttgtcacactctgacagagaagcttgttgccatgacaatgggctctggggccaagatgaagacttcagccagtgtcagcgacatcattgtggtggccaagcggatcagccccagggtggatgatgttgtgaagtcgatgtaccctccgttggaccccaaactcctggacgcacggacgactgccctgctcctgtctgtcagtcacctggtgctggtgacaaggaatgcctgccatctgacgggaggcctggactggattgaccagtctctgtcggctgctgaggagcatttggaagtccttcgagaagcagccctagcttctgagccagataaaggcctcccaggccctgaaggcttcctgcaggagcagtctgcaatttag

SEQ ID NO: 873 - DNA, 3708 bp, Homo Sapiens
atggatggcccgacgcggggccatggactccgcaaaaagcggcggtcgcggtcgcagcgagaccgggagaggcgctcccggggcgggctgggggccggcgcggccggcggcggcggggctggccggacccgggcgctctcactcgcctcgtcgtcgggctccgacaaggaagacaatgggaagcccccgtcctccgccccgtcccggcccagacccccgcggaggaagcggagagagtccacctcggcagaagaggacatcattgatggatttgccatgaccagctttgtcacttttgaagcgctggagaaagatgtagcacttaagcctcaggaacgtgtggagaaacgccagacgcccctgaccaagaagaaacgagaagcacttaccaatggcttgtcctttcattcaaagaagagcagactcagccacccacaccactacagctcagatcgagaaaatgaccgcaatctctgccagcaccttgggaagagaaagaaaatgccgaaggcactcagacagctcaagccaggacagaacagctgcagggacagtgacagtgaaagtgccagtggagaatccaagggcttccaccggagcagctctcgggaaaggctcagtgatagttcagctccttccagcttgggaacaggctacttctgtgacagtgacagtgaccaggaagagaaggcatcagatgccagctctgaaaaactcttcaacactgttattgtaaacaaagatccggagttaggtgttggcacgctaccagaacatgacagccaggatgcagggccgattgtccccaagatatcgggtctagagagaagccaggagaagagccaggactgttgcaaagagccaatctttgagcctgtggtgcttaaagacccctgccctcaggtcgcacagccaataccccagccgcagacggagccccaactccgagctccttctccggaccctgacttggtgcagcgcacagaggccccacctcaacccccacctctgagtacacagccaccacagggccctcctgaggcccagctccagcctgccccgcagcctcaggtgcagaggccacccaggccacagtcccccacccagctgctccatcagaacctcccacctgtgcaggcccacccctctgctcagagcctctcccagccattgtcagcctacaacagcagtagcttaagcctcaacagtttaagcagcagcagaagcagcactccagcgaagactcagcccgccccacctcacatctcccaccacccctctgcctccccgttccccctctccctgcccaaccacagccccctgcacagcttcacacccaccctccagccccccgcacactcacatcaccccaatatgtttgcccctcccactgctctgcctcctccaccaccactgacatcaggaagtctgcaggtggccggacacccggccgggagcacttactcagagcaagacatcttgcgacaggaactgaacactcgttttttggcctctcagagtgctgaccgcggggcttccctgggccctccgccctacctgcggaccgagttccatcagcaccagcaccagcaccagcacacccaccagcacacgcaccagcacaccttcacgccgttcccccacgccatcccacccaccgccatcatgccgacgccagcacctcccatgtttgacaaataccctacaaaagttgacccattctaccggcacagtctcttccattcctatcctcctgcagtgtcgggcatcccccctatgatcccacccactggcccttttggttcactacaaggagcatttcagccgaagttgacagatcctttcagacctatgttaaggaaaccagggaagtggtgtgctatgcatgttcacatcgcctggcagatttaccaccaccaacagaaagtcaagaaacagatgcagtcagacccacataagctggactttggactgaaacctgagttcctgagccgccctccaggccccagtctttttggagccatccaccacccccatgacctggcacggccttcaactttgttctctgccgctggtgctgcacacccaactgggaccccttttgggccacctcctcatcacagcaacttcctcaaccctgctgcccacctagagccttttaatcggccgtctacattcacaggcctagcagcagttggtggcaatgccttcgggggacttggaaatccttccgttacacccaactcaatgttcggccacaaggatggccccagtgtgcagaactttagcaaccctcacgaaccctggaaccggctgcaccgaacgcctccgtcgttcccgacccctccgccctggctgaagccaggggagctggagcgcagcgcgtccgctgcagctcatgacagagatagagatgtagataaacgagactcatctgttagtaaagatgacaaagaaagggaaagcgtcgagaagagacactccagccacccttcaccagcacctgtcctcccggtgaatgccctgggacatacccgcagctccactgaacagatccgggctcatctgaacactgaggctcgggagaaggacaaacccaaagagagggagagagaccactcggaatcccgcaaggacctggccgccgacgagcacaaggcgaaagagggccacctgcccgagaaggacgggcacggccacgaggggcgcgccgcgggcgaagaggccaagcagctggcccgggtgccgtctccctacgtgcggaccccggtggtggagagtgccaggcccaacagcacctcgagccgggaggccgagccgcgcaagggtgagccggcctacgagaaccccaagaagagctccgaggtcaaggtgaaggaggagcggaaggaagaccatgacctgcctccagaggccccgcagacccaccgggcctcggagccgccgcctcccaactcctcgtccagcgtgcacccggggcccctggcctcgatgcccatgacggtgggggtgacgggcattcaccccatgaacagcatcagcagcctggacaggactcgcatgatgacccccttcatgggcatcagccccctcccgggcggagagcgcttcccgtacccttctttccactgggaccccatccgggaccccttgagggatccttaccgagaacttgacattcaccggagagacccgctgggcagggacttcctgctaaggaacgacccgctccaccggctctcgactccccggctgtacgaagccgaccgctccttcagggaccgggagcctcacgactacagccaccaccaccaccaccaccaccacccgctgtctgtggaccctcggcgggagcacgagcggggaggccacctggacgagcgggagcgcttgcacatgctcagagaagactacgagcacacgcggctccactccgtgcaccccgcctccctcgacggacacctcccccaccccagcctcatcaccccgggactccccagcatgcactatccccgcatcagccccaccgcgggcaaccagaacggactcctcaacaagacccctccgacagcagcgctgagcgcacctcccccgctcatctccacgctggggggccgcccggtctctcccagaaggacgactcctctgtccgcagagataagggagaggcccccttcccacacgctgaaggatatcgaggcccgataa

SEQ ID NO: 874 - DNA, 675 bp, Homo Sapiens
atggcgccacccgcggcgcctggccgggaccgtgtgggccgtgaggatgaggacggctgggagacgcgaggggaccgcaaggcccggaagcccctggtggagaagaagcggcgcgcgcggatcaacgagagcctgcaggagctgcggctgctgctggcgggcgccgaggtgcaggccaagctggagaacgccgaagtgctggagctgacggtgcggcgggtccagggtgtgctgcggggccgggcgcgcgagcgcgagcagctgcaggcggaagcgagcgagcgcttcgctgccggctacatccagtgcatgcacgaggtgcacacgttcgtgtccacgtgccaggccatcgacgctaccgtcgctgccgagctcctgaaccatctgctcgagtccatgccgctgcgtgagggcagcagcttccaggatctgctgggggacgccctggcggggccacctagagcccctggacggagtggctggcctgcggggggcgctccgggatccccaatacccagccccccgggtcctggggacgacctgtgctccgacctggaggaggcccctgaggctgaactgagtcaggctcctgctgaggggcccgacttggtgcccgcagccctgggcagcctgaccacagcccaaattgcccggagtgtctggaggccttggtga

SEQ ID NO: 875 - DNA, 666 bp, Homo Sapiens
atggcgggaggggtgctcccgctgaggggcctccgcgccttgtgtcgcgtgctgctcttcctctcgcagttctgcattctgtcgggcggtgaaagtactgaaatcccaccttatgtgatgaagtgtccgagcaatggtttgtgtagcaggcttcctgcagactgtatagactgcacaacaaatttctcctgtacctatgggaagcctgtcacttttgactgtgcagtgaaaccatctgttacctgtgttgatcaagacttcaaatcccaaaagaacttcatcattaacatgacttgcagattttgctggcagcttcctgaaacagattacgagtgtaccaactccaccagctgcatgacggtgtcctgtcctcggcagcgctaccctgccaactgcacggtgcgggaccacgtccactgcttgggtaaccgtacttttcccaaaatgctatattgcaattggactggaggctataagtggtctacggctctggctctaagcatcaccctcggtgggtttggagcagaccgtttctacctgggccagtggcgggaaggcctcggcaagctcttcagcttcggtggcctgggaatatggacgctgatagacgtcctgctcattggagttggctatgttggaccagcagatggctctttgtacatttag

SEQ ID NO: 876 - DNA, 2631 bp, Homo Sapiens
atgggaccagaggccctgtcatctttactgctgctgctcttggtggcaagtggagatgctgacatgaagggacattttgatcctgccaagtgccgctatgccctgggcatgcaggaccggaccatcccagacagtgacatctctgcttccagctcctggtcagattccactgccgcccgccacagcaggttggagagcagtgacggggatggggcctggtgccccgcagggtcggtgtttcccaaggaggaggagtacttgcaggtggatctacaacgactgcacctggtggctctggtgggcacccagggacggcatgccgggggcctgggcaaggagttctcccggagctaccggctgcgttactcccgggatggtcgccgctggatgggctggaaggaccgctggggtcaggaggtgatctcaggcaatgaggaccctgagggagtggtgctgaaggaccttgggccccccatggttgcccgactggttcgcttctacccccgggctgaccgggtcatgagcgtctgtctgcgggtagagctctatggctgcctctggagggatggactcctgtcttacaccgcccctgtggggcagacaatgtatttatctgaggccgtgtacctcaacgactccacctatgacggacataccgtgggcggactgcagtatgggggtctgggccagctggcagatggtgtggtggggctggatgactttaggaagagtcaggagctgcgggtctggccaggctatgactatgtgggatggagcaaccacagcttctccagtggctatgtggagatggagtttgagtttgaccggctgagggccttccaggctatgcaggtccactgtaacaacatgcacacgctgggagcccgtctgcctggcggggtggaatgtcgcttccggcgtggccctgccatggcctgggagggggagcccatgcgccacaacctagggggcaacctgggggaccccagagcccgggctgtctcagtgccccttggcggccgtgtggctcgctttctgcagtgccgcttcctctttgcggggccctggttactcttcagcgaaatctccttcatctctgatgtggtgaacaattcctctccggcactgggaggcaccttcccgccagccccctggtggccgcctggcccacctcccaccaacttcagcagcttggagctggagcccagaggccagcagcccgtggccaaggccgaggggagcccgaccgccatcctcatcggctgcctggtggccatcatcctgctcctgctgctcatcattgccctcatgctctggcggctgcactggcgcaggctcctcagcaaggctgaacggagggtgttggaagaggagctgacggttcacctctctgtccctggggacactatcctcatcaacaaccgcccaggtcctagagagccacccccgtaccaggagccccggcctcgtgggaatccgccccactccgctccctgtgtccccaatggctctgcctacagtggggactatatggagcctgagaagccaggcgccccgcttctgcccccacctccccagaacagcgtcccccattatgccgaggctgacattgttaccctgcagggcgtcaccgggggcaacacctatgctgtgcctgcactgcccccaggggcagtcggggatgggccccccagagtggatttccctcgatctcgactccgcttcaaggagaagcttggcgagggccagtttggggaggtgcacctgtgtgaggtcgacagccctcaagatctggttagtcttgatttcccccttaatgtgcgtaagggacaccctttgctggtagctgtcaagatcttacggccagatgccaccaagaatgccaggaatgatttcctgaaagaggtgaagatcatgtcgaggctcaaggacccaaacatcattcggctgctgggcgtgtgtgtgcaggacgaccccctctgcatgattactgactacatggagaacggcgacctcaaccagttcctcagtgcccaccagctggaggacaaggcagccgagggggcccctggggacgggcaggctgcgcaggggcccaccatcagctacccaatgctgctgcatgtggcagcccagatcgcctccggcatgcgctatctggccacactcaactttgtacatcgggacctggccacgcggaactgcctagttggggaaaatttcaccatcaaaatcgcagactttggcatgagccggaacctctatgctggggactattaccgtgtgcagggccgggcagtgctgcccatccgctggatggcctgggagtgcatcctcatggggaagttcacgactgcgagtgacgtgtgggcctttggtgtgaccctgtgggaggtgctgatgctctgtagggcccagccctttgggcagctcaccgacgagcaggtcatcgagaacgcgggggagttcttccgggaccagggccggcaggtgtacctgtcccggccgcctgcctgcccgcagggcctatatgagctgatgcttcggtgctggagccgggagtctgagcagcgaccacccttttcccagctgcatcggttcctggcagaggatgcactcaacacggtgtga

SEQ ID NO: 877 - DNA, 1395 bp, Homo Sapiens
atggaaactgaacagccagaagaaaccttccctaacactgaaaccaatggtgaatttggtaaacgccctgcagaagatatggaagaggaacaagcatttaaaagatctagaaacactgatgagatggttgaattacgcattctgcttcagagcaagaatgctggggcagtgattggaaaaggaggcaagaatattaaggctctccgtacagactacaatgccagtgtttcagtcccagacagcagtggccccgagcgcatattgagtatcagtgctgatattgaaacaattggagaaattctgaagaaaatcatccctaccttggaagagggcctgcagttgccatcacccactgcaaccagccagctcccgctcgaatctgatgctgtggaatgcttaaattaccaacactataaaggaagtgactttgactgcgagttgaggctgttgattcatcagagtctagcaggaggaattattggggtcaaaggtgctaaaatcaaagaacttcgagagaacactcaaaccaccatcaagcttttccaggaatgctgtcctcattccactgacagagttgttcttattggaggaaaacccgatagggttgtagagtgcataaagatcatccttgatcttatatctgagtctcccatcaaaggacgtgcacagccttatgatcccaatttttacgatgaaacctatgattatggtggttttacaatgatgtttgatgaccgtcgcggacgcccagtgggatttcccatgcggggaagaggtggttttgacagaatgcctcctggtcggggtgggcgtcccatgcctccatctagaagagattatgatgatatgagccctcgtcgaggaccacctccccctcctcccggacgaggcggccggggtggtagcagagctcggaatcttcctcttcctccaccaccaccacctagagggggagacctcatggcctatgacagaagagggagacctggagaccgttacgacggcatggttggtttcagtgctgatgaaacttgggactctgcaatagatacatggagcccatcagaatggcagatggcttatgaaccacagggtggctccggatatgattattcctatgcagggggtcgtggctcatatggtgatcttggtggacctattattactacacaagtaactattcccaaagatttggctggatctattattggcaaaggtggtcagcggattaaacaaatccgtcatgagtcgggagcttcgatcaaaattgatgagcctttagaaggatccgaagatcggatcattaccattacaggaacacaggaccagatacagaatgcacagtatttgctgcagaacagtgtgaagcagtatgcagatgttgaaggattctaa

SEQ ID NO: 878 - DNA, 2217 bp, Homo Sapiens
atgcagccgaggtgggcccaaggggccacgatgtggcttggagtcctgctgacccttctgctctgttcaagccttgagggtcaagaaaactctttcacaatcaacagtgttgacatgaagagcctgccggactggacggtgcaaaatgggaagaacctgaccctgcagtgcttcgcggatgtcagcaccacctctcacgtcaagcctcagcaccagatgctgttctataaggatgacgtgctgttttacaacatctcctccatgaagagcacagagagttattttattcctgaagtccggatctatgactcagggacatataaatgtactgtgattgtgaacaacaaagagaaaaccactgcagagtaccaggtgttggtggaaggagtgcccagtcccagggtgacactggacaagaaagaggccatccaaggtgggatcgtgagggtcaactgttctgtcccagaggaaaaggccccaatacacttcacaattgaaaaacttgaactaaatgaaaaaatggtcaagctgaaaagagagaagaattctcgagaccagaattttgtgatactggaattccccgttgaggaacaggaccgcgttttatccttccgatgtcaagctaggatcatttctgggatccatatgcagacctcagaatctaccaagagtgaactggtcaccgtgacggaatccttctctacacccaagttccacatcagccccaccggaatgatcatggaaggagctcagctccacattaagtgcaccattcaagtgactcacctggcccaggagtttccagaaatcataattcagaaggacaaggcgattgtggcccacaacagacatggcaacaaggctgtgtactcagtcatggccatggtggagcacagtggcaactacacgtgcaaagtggagtccagccgcatatccaaggtcagcagcatcgtggtcaacataacagaactattttccaagcccgaactggaatcttccttcacacatctggaccaaggtgaaagactgaacctgtcctgctccatcccaggagcacctccagccaacttcaccatccagaaggaagatacgattgtgtcacagactcaagatttcaccaagatagcctcaaagtcggacagtgggacgtatatctgcactgcaggtattgacaaagtggtcaagaaaagcaacacagtccagatagtcgtatgtgaaatgctctcccagcccaggatttcttatgatgcccagtttgaggtcataaaaggacagaccatcgaagtccgttgcgaatcgatcagtggaactttgcctatttcttaccaacttttaaaaacaagtaaagttttggagaatagtaccaagaactcaaatgatcctgcggtattcaaagacaaccccactgaagacgtcgaataccagtgtgttgcagataattgccattcccatgccaaaatgttaagtgaggttctgagggtgaaggtgatagccccggtggatgaggtccagatttctatcctgtcaagtaaggtggtggagtctggagaggacattgtgctgcaatgtgctgtgaatgaaggatctggtcccatcacctataagttttacagagaaaaagagggcaaacccttctatcaaatgacctcaaatgccacccaggcattttggaccaagcagaaggctagcaaggaacaggagggagagtattactgcacagccttcaacagagccaaccacgcctccagtgtccccagaagcaaaatactgacagtcagagtcattcttgccccatggaagaaaggacttattgcagtggttatcatcggagtgatcattgctctcttgatcattgcggccaaatgttattttctgaggaaagccaaggccaagcagatgccagtggaaatgtccaggccagcagtaccacttctgaactccaacaacgagaaaatgtcagatcccaatatggaagctaacagtcattacggtcacaatgacgatgtcagaaaccatgcaatgaaaccaataaatgataataaagagcctctgaactcagacgtgcagtacacggaagttcaagtgtcctcagctgagtctcacaaagatctaggaaagaaggacacagagacagtgtacagtgaagtccggaaagctgtccctgatgccgtggaaagcagatactctagaacggaaggctcccttgatggaacttag

SEQ ID NO: 879 - DNA, 975 bp, Homo Sapiens
atgccggagctggcagtgcagaaggtggtggtccaccccctggtgctgctcagtgtggtggatcatttcaaccgaatcggcaaggttggaaaccagaagcgtgttgttggtgtgcttttggggtcatggcaaaagaaagtacttgatgtatcgaacagttttgcagttccttttgatgaagatgacaaagacgattctgtatggtttttagaccatgattatttggaaaacatgtatggaatgtttaagaaagtcaatgccagggaaagaatagttggctggtaccacacaggccctaaactacacaagaatgacattgccatcaacgaactcatgaaaagatactgtcctaattccgtattggtcatcattgatgtgaagccgaaggacctagggctgcctacagaagcgtacatttcagtggaagaagtccatgatgatggaactccaacctcgaaaacatttgaacacgtgaccagtgaaattggagcagaggaagctgaggaagttggagttgaacacttgttacgagatatcaaagacacgacggtgggcactctgtcccagcggatcacaaaccaggtccatggtttgaagggactgaactccaagcttctggatatcaggagctacctggaaaaagtcgccacaggcaagctgcccatcaaccaccagatcatctaccagctgcaggacgtcttcaacctgctgccagatgtcagcctgcaggagttcgtcaaggccttttacctgaagaccaatgaccagatggtggtagtgtacttggcctcgctgatccgttccgtggtcgccctgcacaacctcatcaacaacaagattgccaaccgggatgcagagaagaaagaagggcaggagaaagaagagagcaaaaaggataggaaagaggacaaggagaaagataaagataaggaaaagagtgatgtaaagaaagaggagaaaaaggagaaaaagtaa

SEQ ID NO: 880 - DNA, 750 bp, Homo Sapiens
atggccatgctcagggtccagcccgaggcccaagccaaggtggatgtgtttcgtgaagacctctgtaccaagacagagaacctgctcgggagctatttccccaagaagatttctgagctggatgcatttttaaaggagccagctctcaatgaagccaacttgagcaatctgaaggccccattggacatcccagtgcctgatccagtcaaggagaaagagaaagaggagcggaagaaacagcaggagaaggaagacaaggatgaaaagaagaagggggaggatgaagacaaaggtcctccctgtggcccagtgaactgcaatgaaaagatcgtggtccttctgcagcgcttgaagcctgagatcaaggatgtcattgagcagctcaacctggtcaccacctggttgcagctgcagatacctcggattgaggatggtaacaattttggagtggctgtccaggagaaggtgtttgagctgatgaccagcctccacaccaagctagaaggcttccacactcaaatctctaagtatttctctgagcgtggtgatgcagtgactaaagcagccaagcagccccatgtgggtgattatcggcagctggtgcacgagctggatgaggcagagtaccgggacatccggctgatggtcatggagatccgcaatgcttatgctgtgttatatgacatcatcctgaagaacttcgagaagctcaagaagcccaggggagaaacaaagggaatgatctattga

SEQ ID NO: 881 - DNA, 294 bp, Homo Sapiens
atgacgaagggaacgtcatcgtttggaaagcgtcgcaataagacgcacacgttgtgccgccgctgtggctctaaggcctaccaccttcagaagtcgacctgtggcaaatgtggctaccctgccaagcgcaagagaaagtataactggagtgccaaggctaaaagacgaaataccaccggaactggtcgaatgaggcacctaaaaattgtataccgcagattcaggcatggattccgtgaaggaacaacacctaaacccaagagggcagctgttgcagcatccagttcatcttaa

SEQ ID NO: 882 - DNA, 255 bp, Homo Sapiens
atgcctctcgcaaaggatctccttcatccctctccagaagaggagaagaggaaacacaagaagaaacgcctggtgcagagccccaattcctacttcatggatgtgaaatgcccaggatgctataaaatcaccacggtctttagccatgcacaaacggtagttttgtgtgttggctgctccactgtcctctgccagcctacaggaggaaaagcaaggcttacagaaggatgttccttcaggaggaagcagcactaa

SEQ ID NO: 883 - DNA, 1671 bp, Homo Sapiens
atggcgcgggagaaggagatgcaggagttcacccgtagcttcttccgaggccgcccggacctcagcacgcttacgcattccatcgtgcggcggaggtacttagctcactcgggccgcagccacctggagcccgaggagaagcaggcactgaagcggctggtggaggaggagctgctgaagatgcaggtggatgaagccgcttccagggaagacaaactggaccttaccaagaagggcaagaggcctcccaccccttgtagcgacccggagagaaaaaggttccgcttcaattcagagtcggagtccggctctgaagcctccagcccagactactttggacccccagcaaagaatggggtggcagcagaagtcagcccagccaaagaggagaatccaaggcgagcctcaaaggcagttgaggagagcagtgatgaggaacggcagagggacctgcccgcacagaggggagaggagagcagtgaggaggaggaaaaggggtacaaggggaagactaggaagaaacctgtggtaaagaagcaggcaccaggcaaggcctcagtcagtaggaagcaggccagggaagaaagtgaggagagcgaggcagaacccgttcagaggacagcaaagaaggtggagggaaataaaggaactaaaagcctgaaggaaagtgaacaggagagtgaagaggagatcctagcccagaagaaagagcagagagaggaggaagtggaggaggaagagaaagaagaggatgaggaaaagggggattggaaacccagaaccaggagcaatggccggagaaagtcagctagggaggagaggagctgtaagcagaaaagccaggcaaagaggctcttgggagactcagacagcgaggaagagcagaaagaggcagccagcagtggggatgacagtgggagagatagagaacccccagtgcagaggaagagtgaggacaggacccagcttaagggtgggaagaggttgagtggaagcagcgaggacgaggaagacagtgggaagggggaacccacagctaaaggctctagaaagatggccagactgggcagcaccagtggtgaggaaagtgacttggagagggaggtaagtgacagcgaggcagggggaggcccccagggggagaggaagaaccgctcttccaagaagagctccaggaaaggcaggacacgaagctcctcttcctcctcagatggaagtccagaggccaaaggagggaaggctggctcaggtcgccgtggagaggaccacccggctgtgatgaggctgaagcgctacattcgggcctgtggtgcccatcgaaactacaagaagctgttgggctcctgttgctcacacaaggagcgcctgagtatcctccgggcagaactggaagcgctaggcatgaagggtaccccttccctagggaagtgtcgggccctgaaggagcagagggaggaggcagctgaggtggcctccttggatgttgcgaacatcatcagtggctcgggccggccacgcagacgtacagcctggaaccctttaggagaagcagcacccccaggggagctgtaccgacggaccctggactcagatgaagagcggccccgtcccgcacccccagactggtcacatatgcgtggcatcatcagcagtgatggcgagagtaactga

SEQ ID NO: 884 - DNA, 3513 bp, Homo Sapiens
atgaatatgtttctgtactttcagaccatcatcaaagaggggatgctgaccaaacagaacaattcattccagcgatcaaaaaggagatactttaagcttcgagggcgaacgctttactatgccaaaacggcaaagtcaatcatatttgatgaggtggatctgacagatgccagcgtagctgaatccagtaccaaaaacgtcaacaacagttttacggtcataactccatgcaggaagctcatcttgtgtgctgataacagaaaagaaatggaagattggattgcagcattaaagactgtgcagaacagggagcactttgagcccacccagtacagcatggaccacttctcagggatgcacaattggtacgcctgttcccacgcgaggccgacctactgcaatgtgtgccgtgaggctctgtctggggtcacgtcgcacgggctgtcctgcgaggtgtgcaaatttaaggcccacaagcgctgtgctgtgcgtgcaaccaataactgcaagtggaccacactggcctcgatcgggaaggacatcattgaagatgcagatgggattgcaatgccccaccagtggttggaaggaaacctacctgtgagcgccaagtgcactgtgtgcgacaagacctgtggcagtgtgctgcgcctgcaggactggcgctgcctctggtgcaaggccatggttcacacatcgtgtaaagaatccttgctgaccaagtgcccacttggcctgtgcaaagtgtcagtcatcccacccacggctctcaacagcatcgactccgatgggttctggaaggccagctgtcctccttcttgcacaagcccactgttggtcttcgtcaattcaaaaagtggggacaaccagggtgtgaagttcctcagaagattcaaacagctactaaaccccgcccaggtcttcgacctcatgaacggaggcccacacctcggcttacggttattccagaagtttgacacattccggattctggtttgtggcggggatggaagtgttggctgggtcctctccgaaatcgacagcctcaaccttcataaacagtgtcagctgggagtgctgccgctcggcacagggaacgacttggcccgagtactgggctggggctcagcctgcgatgacgacacccagctcccccagatcttggagaagttggagagagccagcaccaagatgctggacaggtggagcgtcatggcatacgaggccaagctcccccggcaggcctcctcctctaccgtcaccgaagacttcagcgaggattccgaggtacagcagattctcttctatgaagactcggttgcagcccacctttctaaaatcctcacctcggaccagcactcggtggtcatctcctcggccaaagtgctctgtgagacggtgaaggacttcgtggcacgggtggggaaggcctatgagaagacgaccgagagctcggaggagtcagaggtcatggccaagaagtgctctgtcctgaaagagaagctggattcccttctcaagaccttggacgatgagtcccaggcctcgtcctctctgcccaacccgccccccaccattgccgaggaggctgaagatggagatgggtcgggcagcatctgcggttccaccggagaccgcttggtggcatcagcttgcccggcccggccgcagatattccggcctcgagaacagctcatgctgagagccaacagcctgaagaaagcaattcgtcagatcatagaacacacagaaaaagctgtcgatgagcagaatgcccagacccaggagcaggagggcttcgtcctgggcctctctgagtcagaggagaagatggaccacagagtgtgcccaccactgtcccacagcgagagcttcggggtccccaaggggaggagccagcgcaaagtgtcgaaatctccgtgtgaaaagctgatcagcaaagggagtctgtccctaggcagttctgcttcccttccgccccagccgggaagccgggacggcctgcctgcgctcaacaccaagatcctgtacccaaatgtccgggctggaatgtctggttccttacccggtggctcagtcatcagtcgcctgttaattaatgctgatcccttcaactctgaaccagaaaccctagagtattacacggagaaatgtgtcatgaacaactattttggcattggcctggatgcgaagatatccctggactttaacaacaagcgcgatgagcacccagagaagtgcaggagccgaaccaagaacatgatgtggtatggagttcttggaaccaaagagttgctgcacagaacctacaagaacctggagcaaaaggtcttgctggagtgtgacgggcgacccatcccactccccagtcttcagggaattgctgtccttaacattcccagctatgccggaggaaccaacttctgggggggtaccaaggaagatgatactttcgcagctccatcattcgatgacaagattctggaggtggtcgccgtgttcggcagcatgcagatggccgtctctcgagtcatcaggctacagcatcatcggatcgcccagtgtcgcacggtgaagatctccatccttggggatgagggcgtgcctgtgcaggtggacggagaggcctgggtccagccgccagggtacattcggattgtccacaagaaccgggcacagacactgaccagagacagggcatttgagagcaccctgaagtcctgggaagacaagcagaagtgcgagctgccccgccctccatcctgttccctgcacccggagatgctgtccgaggaggaggccacccagatggaccagtttgggcaggcagcaggggtcctcattcacagtatccgagaaatagctcagtctcaccgggacatggagcaggaactggcccacgccgtcaatgccagctccaagtccatggaccgtgtgtatggcaagcccagaaccacagaggggctcaactgcagcttcgtcctggaaatggtgaataacttcagagctctgcgcagtgagacggagctgctgctgtctgggaagatggccctgcagctggatccgcctcagaaggagcagctggggagtgctcttgccgagatggaccgacagctcaggaggctggcagacaccccgtggctctgccagtccgcagagcccggcgacgaagagagtgtgatgctggatcttgccaagcgcagtcgcagtggtaaattccgcctcgtgaccaagtttaaaaaggagaaaaacaacaagaacaaagaagctcacagtagcctgggagccccggttcacctctgggggacagaggaggttgctgcctggctggagcacctcagtctctgtgagtataaggacatcttcacacggcacgacatccggggctctgagctcctgcacctggagcggagggacctcaaggacctgggcgtgaccaaggtgggccacatgaagaggatcctgtgtggcatcaaggagctgagccgcagcgcccccgccgtcgaggcctag

SEQ ID NO: 885 - DNA, 1062 bp, Homo Sapiens
atggcgatgacactgttggaagactggtgccgggggatggatgtgaactcccagagagctctgttagtctggggcatcccagtgaactgtgatgaggctgaaatcgaagagaccctccaggctgcgatgccccaggtctcctaccgaatgcttgggagaatgttctggagggaagaaaatgcgaaagcagccttattagagctcactggcgctgtagattacgccgcgatccccagggagatgccgggcaaaggaggggtctggaaagtgttatttaagcccccaacttctgatgctgaatttttagaaagattgcacctcttcctagctagagaggggtggaccgtgcaagatgttgcccgtgtccttgggtttcagaaccctactccgaccccgggcccagagatgccagcagagatgctaaactatattttggataatgttattcagcctcttgttgagtccatatggtacaagaggctgacacttttctcggggagggacatcccagggcctggagaggaaacctttgatccctggctggagcacactaatgaggtcctagaggagtggcaggtgtccgatgtagaaaagaggcggcggttgatggagagtcttagaggccccgccgctgatgttattcgcatccttaagtccaacaaccccgcgataaccactgccgaatgcctgaaggcgcttgagcaggtgtttgggagcgttgagagctctagggatgcccagatcaaatttctgaacacttatcagaacccgggagaaaaattgtctgcttatgtcattcgtctggagcctctgctacagaaggtggtagagaagggggccattgataaagataatgtgaaccaggcccgcctagagcaggtcattgccggggccaaccacagcggggccatccgaaggcagctgtggcttaccggggctggggaagggccagccccaaacctctttcagttgctggtgcagatccgtgaggaggaagccaaggaggaggaggaggaggctgaggccacccttctgcagttaggcctggaagggcacttctga

SEQ ID NO: 886 - DNA, 6708 bp, Homo Sapiens
atgcctctgttcttctccgcgctgttggtcttgctgctagttgcgcttagcgccctctttctaggccggtggcttgtggtccggttggccaccaagtggtgtcagcggaagctgcaggcggagctaaagattggctccttccgctttttttggatccagaatgtcagtcttaagtttcagcaacaccagcaaacagtggaaattgataacctgtggatttccagcaaactccttagccatgatcttccacactatgtggcattgtgctttggagaagtgcgtatcagaacggacctacagaaagtttctgacctgtctgccccattctcccagagcgctggggtggatcaaaaggaactgtccttcagcccatccttattgaagatcttctgccaactattctccattcatgtagatgctataaacatcatggttctcaaggtggatacctctgagtccttatggcatattcagatcagtagaagcagatttcttttggatagtgatgggaaaaggctaatctgtgaggtgagcttatgtaagatcaacagcaaagttctaaagagtggtcagctggaggacacctgcctagtggagctttcactggccctggacctgtgtctaaaggtgggcattagcagtcggcatctcactgctatcactgtggatgtgtggacactccatgctgaactgcatgagggcctcttccagagccaactgctgtgccagggcccaagcctagcatctaagcctgttccctgttcagaggtgacagaaaacttagttgagccaactctgcctggcctattccttctccagcagctgccagaccaggtcaaggttaagatggagaacacaagcgtggtattgtccatgaatagtcaaaagaggcacctgacttggactctgaagctgctgcagttcctgtaccaccgtgatgaggatcagctgccccttcgaagcttcacagcaaactctgatatggcacagatgagcactgaactgctgctggaagatgggttgttgttgtcccagagtcgccaacgcattgtctgcctcaactccctcaaggctagtgtgcaggtgaccaccattgacctctcagcctccctagttctgaacacttgcatcattcactaccggcaccaggaattctctcactggctgcacctgctagcactggaaacccaagggtctagttcacctgttctaaagcaaaggaaaaaaagaaccttcccccaaatcctggctcccatcatctttagcacctccatctccaatgtcaacatttccattcaacttggagatacaccaccttttgccttgggattcaattctatctctctggattaccagcacctcaggccacaaagcatccatcagcggggcgtcctaactgtggaccacctctgctggcgtgtgggcagtgactcccacattcagcgggcgccacacccacccaatatgcatgtttggggtgaggcacttgttctggactccttcacactacagggtagctataaccagcctctgggcctgtccagcacccagtcagataccctttttcttgattgtaccattcgaggacttcaggtggaagcatcagatacctgtgcccaatgtctgtctcgtatcttatccctgatgggtccacaatctgggaagtcagctgtctctaggcactcttcatttggggaatctgtgtcattactgtggaaggtggacttgaaggtcgaagacatgaacttgtttaccctttctgccttggttggtgcttcagaggtacgactggacaccctaactatcctgggcagtgcagagacgtccactgtggggattcaaggacttgtgttagcgctggtgaaatcagtcacggagaagatgcaaccctgttgcaaggcccctgacatccctaccccagtgctcagcctttccatgctctccatcacctatcacagcagcatccgctctctggaggttcagtgtggtgcagggctgaccttactttggagccccccagatcacatgtacctgtaccagcatgtcctggccactctacagtgccgagacctactaagagccactgtgtttcctgagactgtaccatcccttgcactagagacttcaggaactacttctgagctagaaggccgtgcccctgagccattacccccaaagcggctgctaaacctaaccctggaggtgagcacagccaagctcacagcttttgtagctgaggacaagttcattaccctggctgcagagagtgtgtcactgagccggcatggaggttccctgcaggcatactgtccagagctggctgctggctttgatggcaatagtatcttcaacttcaaggaggtggaggtgcagctgctacctgagctggaagagatgatcctccaccggaaccccttccctgcgctgcagaccctccggaaccgtgtttggctcctctctttcggctcagtctcggtggagtttccttatcagtatgacttttctcgaactctagatgaggctgtgggagttcagaagtggctgaagggactacatcaagggactcgtgcttgggcctctccaagccctgtcccactcccacctgatctactcttaaaggttgagcacttctcatgggttttcttggatgatgtttttgaggtgaaacttcatgataactacgagctgatgaaggatgaaagtaaggagagtgccaaaagactacagctactggatgctaaagtggccgcccttcggaagcagcatggggagttgttgcctgcccgcaaaattgaggagctctatgcctctttggaacgcaaaaacattgaaatctacatccagcgttcccgtcgtctctatggcaacacacccatgcgccgggcactgcttacttggagcttagcagggctagaactggtagctctggcagatgcctccttccatggtcctgagcatgtggtagaacaggttcaagagcttgatccaggcagcccttttccccctgagggattagatcttgtcattcagtggtgtcgaatgctcaagtgcaatgtcaagagctttctggttcggatcagggactatccacggtacctgtttgagatccgtgactggcggctaatgggtcgacttgtgggcaccgagcagagtggtcagccttgctcccgtcggcgtcagatcttgcacttggggcttccgtggggtaacgtggcagtggagaggaacatgcccccactcaaattctaccatgactttcactcggaaatattccagtacacagtggtgtggggcccatgctgggatccagcctggacactaattggccagtgtgtggacctcttgaccaagccctcagctgaccccagcccacctttgccctggtgggacaagagccgtcttctgttccatggagactggcacatggacattgaacaggcgaacctgcaccagctggccactgaggatccatacaacacaactgaaaatatgcactgggagtggagccacctgtcttttcattggaaacctggtcagtttgtgttcaagggtgacttggatatcaacgtgagaacagcctctaagtatgacgactgctgcttccttcacctgcctgacctctgcatgacactggacctgcagtggctgtgccatgggaacccccatgatcaccatagtgtcactctgcgggccccagagttcctgcctgaggtgcccttgggccagcttcatgactcctaccgggcctttcgctcggagaacctcaatctctccatcaagatggatctgactcggcacagtggaacaatatcccagccccgaattctgctatatagtagtaccctgcgctggatgcaaaacttctgggcaacttggacaagtgtcacaaggcctatctgcaggggaaagctcttcaataacctgaaacccagcaagaagaaacttggtcagcactacaagcaactttcctatacagccctctttccccagctgcaggtacattattgggcctcatttgcccagcaacggggcatccagattgagtgcagtcagggccatgtcttcactcgggggactcagcggcttatacctcaagcaggcacagtgatgcggcgccttatctctgattggagtgttacccagatggtgagtgacctaagtcaggtgaccgttcacctgatggcctcacccactgaagagaatgctgatcactgtcttgatcccttggtaacaaagacccacctgctgagcttgtcctccctcacctaccaacggcatagcaatcgcacagctgaggaggagctctctgctcgtgatggggatcctacctttcatacacatcagctgcacttagtagatttacggatttcctggacaactaccaatcgagacattgcctttgggttatatgatgggtacaaaaaggcagctgtactcaaacgtaatctttctactgaggccctgaaggggttaaagattgatccacagatgccagccaaaaagccaaagcggggtgtcccaactagtgcctcagccccacctcgtgttaacactcccagcttcagtggacaacctgataaggggtcatcaggaggtgcttacatgttgcagaagctaattgaagagacagataggtttgtagtgttcacagaagaggaatcaggcatgagtgaccagttgtgtggcattgctgcctgccagacggatgacatatacaaccgaaactgccttattgaattggtcaactgtcagatggttcttcgtggagcagagacagaaggctgtgtcattgtgtcagctgccaaagcccaactgctgcagtgccagcaccatccagcctggtatggtgatacattgaagcaaaagacatcctggacttgcctcttggatggcatgcagtactttgccaccactgaaagcagccccacagagcaggatggccgacagctctggttagaggtgaagaatatcgaggagcaccggcagcgtagtctggactctgtgcaggagctgatggagagtgggcaggcagtgggcggcatggttaccacaaccacagattggaaccagccagctgaggcacagcaagcccagcaagtccagcggatcatttcgcgttgcaactgccgaatgtactatattagttacagccatgacattgatcctgaactagcaactcagattaagccacctgaagttcttgagaaccaggaaaaggaagatctcctaaagaagcaggaaggggctgtggataccttcacccttatccaccatgagctggaaatttccaccaacccagctcagtatgccatgatcctggacattgtcaacaacctgctgctccatgtagaacctaagcggaaggaacatagtgagaagaagcaacgggtcaggttccagcttgagatctctagcaatccagaggagcaacgcagcagcatactgcatttgcaggaggctgtgcggcagcatgtggcccaaatacgacagctggagaagcagatgtattctatcatgaagtctttgcaggatgacagcaagaatgagaatctgcttgacctgaaccagaagcttcagttgcagctaaaccaggagaaggccaacctgcagctggaaagtgaagaactgaatatcctcatcaggtgttttaaggatttccaactgcagcgggctaacaagatggagctgcgaaagcagcaagaagatgtgagtgtggtccgtcgcactgagttttactttgctcaggcacggtggcgcctgacagaggaagatggacagctgggaattgctgaattagaactgcagaggttcctctacagcaaggtgaataagtctgatgacacagcagaacatcttctggagttgggctggtttaccatgaacaacctcctccccaatgctgtctataaggtagtactgcggccccagagctcctgccagtctgggcgacagctagctctccgcctcttcagcaaagttcggccccctgttgggggtatctctgttaaggagcattttgaggtaaatgtggtgcctctcaccatccagctgacacaccagttcttccacagaatgatgggctttttctttcctggccgaagtgtggaagatgatgaagttggtgatgaagaggataagtccaaactggtgactactggaataccagtggtgaagcctcggcagctgattgcaacagatgatgcagtaccactgggccctgggaagggtgtggcacagggtttgactcggagttctggggtcagaaggtcatttcgcaaatcgccagagcaccctgtggatgacattgacaagatgaaagagcgagctgccatgaacaactccttcatctacataaagattccacaggttccactgtgtgtcagctacaagggtgagaagaacagtgtggactggggtgaccttaacctggtgctgccctgtctggagtaccacaacaacacatggacatggctagactttgccatggctgtcaaaagggacagccgcaaagccctggttgcccaggtaatcaaagagaagctaaggctgaagtctgcaacaggctctgaggtccggggaaagctagaaactaaatcggacctgaacatgcaacagcaggaagaggaggagaaagcccggctcctcattggtttaagtgtgggcgacaagaaccctggcaagaagtccatctttggcaggcgcaaatga

SEQ ID NO: 887 - DNA, 2457 bp, Homo Sapiens
atgaagaagcagttcaatcgcatgcgccagctggccaaccagacggtgggcagggctgaaaagacagaagttttgagtgaagaccttcttcaggtggagaagcgtctggagctggtgaaacaggtgtcccacagcacgcacaagaagctcaccgcatgtctgcagggccagcaaggggcagaggctgacaagcgctccaaaaagttgcctttgacaacactggctcagtgtctgatggaggggtcagctatcctgggagatgacacacttcttgggaagatgctgaaactctgtggagagacggaggacaagctggctcaggagctgatacattttgagttgcaagtagagagagacgtgattgagcccctgtttttgctggcggaggtggaaatcccaaatattcaaaagcagaggaaacacttagccaagttggtgctggacatggattcctcacgaaccaggtggcagcagacttccaagtcttcaggtttgtccagcagcttacagcctgcgggtgccaaggctgatgccctcagggaagaaatggaagaggctgccaacagagtggagatttgcagggaccagctctcagctgatatgtacagttttgtggccaaagaaattgactatgcaaactactttcaaacgctaatagaagtgcaagctgaataccacaggaagtccctgacactattgcaggctgtattgcctcagatcaaagcacaacaggaggcctgggtagagaagccttccttcgggaagccgctggaggagcacctcaccatcagcggccgggagatcgccttccccatcgaggcgtgtgtgaccatgctgcttgagtgtgggatgcaggaggagggactcttccgagtagccccctctgcctccaaactgaagaagctgaaagcggccctggactgctgcgtggtggatgtgcaggagtactcggcagacccccacgcaattgcaggagctttgaaatcttacctccgagagttgccagaacctcttatgacctttgaactctatgatgagtggatccaggcttccaatgtccaggagcaagacaagaagcttcaggctctatggaatgcttgtgaaaagttgcccaaggccaatcacaacaacatccgatacttgataaaatttttatccaagctgtcagaatatcaagatgtaaacaagatgactcccagtaatatggcaattgttttaggacccaacctcctatggccacaagcagaagggaacattacagagatgatgaccacagtgtcgctgcaaattgttgggatcattgaacctatcatccagcatgcagactggttcttccctggggagatagagttcaacattactggcaattatgggagtccagtacacgtgaaccataatgccaactacagctcaatgccctccccagacatggaccctgctgaccggcgccagcccgagcaggcccgccggcccctcagcgtcgccacggataatatgatgctggagttttacaaaaaggatggccttaggaaaatccaaagcatgggtgtgagggtcatggacacaaactgggtggctcgaagaggctcctcggccggtcggaaagtgtcctgcgccccgccctccatgcagcctcccgccccgcccgccgagctggctgcgcccctgccttcgccgctgccggagcagcccctggacagccccgcggcccccgcgctctctccatccggcctgggcctccagcctgggcccgagcgcaccagcacaacaaaaagcaaggaactttctccaggctctgcacagaaaggaagtccaggctccagccagggcacagcctgtgcagggactcaaccaggggctcaacctggagctcagccgggcgccagccccagccccagccagccgcctgcagaccagagtcctcacaccctccggaaagtttcaaagaagctggcaccgattccacccaaggtcccctttggccagccgggggctatggcagaccagtccgctggccagccgtccccagtcagcctgtcccccaccccgcccagcaccccgtcaccctatggactgagctaccctcaggggtactccttggcctcgggccagctctccccagctgcagctcctcccctggcctctccttctgtctttacaagcactttgagcaaatcgcggcccactcctaagccgcgacagagacctactctgccgcctcctcagcctcccacagtaaacctctcggcctctagtccacagtccacggaggcccccatgctagatggcatgtcccctggggaaagcatgtctacagatcttgtccactttgatattccctcgatccacatagagctcgggtcgacgctccgcctgagtcccctggagcacatgcggcgacactcagtaactgacaagagggactcggaggaggagtctgagagcaccgccctctga

SEQ ID NO: 888 - DNA, 1371 bp, Homo Sapiens
atggcccggtggcccgcacctcctccgcctccgcctccgcctccacctctggccgcgccgccgccgcccggcgcctctgctaaggggccgccggcgcgcaagctgctttttatgtgcaccttgtccctgtctgtcacctacctgtgctacagcctcctgggcggctcgggctccctgcaattccctctggcgctgcaggagtcgccgggcgccgccgccgagcccccgccgagcccgccgccaccctctctgctgcctacccccgtgcgcctcggcgccccctcgcagccgcccgcgccgccgccgctggacaacgcgagccacggggagccgcccgagcccccagagcagccagccgcccccgggaccgacggctgggggctgccgagcggcggcggaggcgcccaggacgcctggctccggaccccgctggcccccagcgagatgatcacggctcagagcgcgctgccggagagggaagcgcaggagtccagcaccaccgacgaggatctcgcaggccggagagcggccaacgggagcagcgagaggggcggcgccgtcagcacccccgactatggggagaagaagctgccacaggcgctcatcatcggggtcaagaaaggagggacccgcgcgctgctggaggcgatccgcgtgcacccggacgtgcgggcggtgggcgtagagccgcacttcttcgacaggaactacgaaaaggggttggagtggtacagaaatgtgatgcccaagactttggatgggcaaataaccatggagaagactccaagttactttgtgacaaatgaggctcccaagcgcattcactccatggccaaggacatcaaactgattgtggtggtgagaaaccccgtgaccagggccatctctgactacacgcagacactgtcaaagaaacccgagatccccacctttgaggtgctggccttcaaaaaccggaccctcgggctgatcgatgcttcctggagtgccattcgaatagggatctatgcgctgcatctggaaaactggctccagtatttccccctctcccagatcctctttgtcagtggtgagcgactcattgtggaccccgccggggaaatggccaaagtacaggattttctaggcctcaaacgtgttgtgactgagaagcatttctatttcaacaaaaccaaggggttcccttgcctaaagaagccagaagacagcagtgccccgaggtgcttaggcaagagcaaaggtcggactcatcctcgcattgacccagatgtcatccacagactgaggaaattctacaaacccttcaacttgatgttttaccaaatgactggtcaagattttcagtgggaacaggaagagggtgataaatga

SEQ ID NO: 889 - DNA, 1053 bp, Homo Sapiens
atggcggcggcggggcccgcggcggggccgacggggcccgagcccatgccgagctacgcgcagctagtgcagcgcggctggggcagcgcgctggcggcggcgcggggctgcacggactgcggctgggggctggcgcgtcgcggcctggctgagcacgcgcacctggcgccgcccgagctgctgctgctggcgctcggcgcgctgggctggaccgccctgcgctccgcggccactgcgcgcctctttcggcccctggcgaagcggtgctgcctccagcccagagatgccgccaagatgcccgagagcgcttggaagtttctcttctacctgggcagctggagctacagtgcctacctgctgtttggcaccgactaccccttcttccatgacccaccatctgtcttctacgactggacgccgggcatggcagtgccacgggacattgcagccgcctacctgctccagggaagcttctatggccactccatctacgctacgctatacatggacacctggcgcaaggactcggtggtcatgctgctccaccacgtggtcactctcatcctcatcgtctcctcctacgccttccggtaccacaatgtgggcatccttgtgctcttcctgcacgatatcagtgacgtgcagcttgagttcaccaagctcaacatttacttcaagtcccgcggcggctcctaccatcggctgcatgccttggcagcagacttgggctgcctcagcttcggcttcagctggttctggttccgcctctactggttcccgctcaaggtcctgtatgccaccagtcactgcagtctgcgcacggtgcctgacatccccttctacttcttcttcaatgcgctcctgctgctgctcacccttatgaacctctactggttcctgtacatcgtggcgtttgcagccaaggtgttgacaggccaggtgcacgagctgaaggacctgcgggagtatgacacagccgaggcccagagcctgaagcccagcaaagccgagaagccactgaggaacggcctggtgaaggacaagcgcttctga

SEQ ID NO: 890 - DNA, 2178 bp, Homo Sapiens
atggccatggactcgtcgcttcaggcccgcctgtttcccggtctcgctatcaagatccaacgcagtaatggtttaattcacagtgccaatgtaaggactgtgaacttggagaaatcctgtgtttcagtggaatgggcagaaggaggtgccacaaagggcaaagagattgattttgatgatgtggctgcaataaacccagaactcttacagcttcttcccttacatccgaaggacaatctgcccttgcaggaaaatgtaacaatccagaaacaaaaacggagatccgtcaactccaaaattcctgctccaaaagaaagtcttcgaagccgctccactcgcatgtccactgtctcagagcttcgcatcacggctcaggagaatgacatggaggtggagctgcctgcagctgcaaactcccgcaagcagttttcagttcctcctgcccccactaggccttcctgccctgcagtggctgaaataccattgaggatggtcagcgaggagatggaagagcaagtccattccatccgaggcagctcttctgcaaaccctgtgaactcagttcggaggaaatcatgtcttgtgaaggaagtggaaaaaatgaagaacaagcgagaagagaagaaggcccagaactctgaaatgagaatgaagagagctcaggagtatgacagtagttttccaaactgggaatttgcccgaatgattaaagaatttcgggctactttggaatgtcatccacttactatgactgatcctatcgaagagcacagaatatgtgtctgtgttaggaaacgcccactgaataagcaagaattggccaagaaagaaattgatgtgatttccattcctagcaagtgtctcctcttggtacatgaacccaagttgaaagtggacttaacaaagtatctggagaaccaagcattctgctttgactttgcatttgatgaaacagcttcgaatgaagttgtctacaggttcacagcaaggccactggtacagacaatctttgaaggtggaaaagcaacttgttttgcatatggccagacaggaagtggcaagacacatactatgggcggagacctctctgggaaagcccagaatgcatccaaagggatctatgccatggcctcccgggacgtcttcctcctgaagaatcaaccctgctaccggaagttgggcctggaagtctatgtgacattcttcgagatctacaatgggaagctgtttgacctgctcaacaagaaggccaagctgcgcgtgctggaggacggcaagcaacaggtgcaagtggtggggctgcaggagcatctggttaactctgctgatgatgtcatcaagatgatcgacatgggcagcgcctgcagaacctctgggcagacatttgccaactccaattcctcccgctcccacgcgtgcttccaaattattcttcgagctaaagggagaatgcatggcaagttctctttggtagatctggcagggaatgagcgaggcgcggacacttccagtgctgaccggcagacccgcatggagggcgcagaaatcaacaagagtctcttagccctgaaggagtgcatcagggccctgggacagaacaaggctcacaccccgttccgtgagagcaagctgacacaggtgctgagggactccttcattggggagaactctaggacttgcatgattgccacgatctcaccaggcataagctcctgtgaatatactttaaacaccctgagatatgcagacagggtcaaggagctgagcccccacagtgggcccagtggagagcagttgattcaaatggaaacagaagagatggaagcctgctctaacggggcgctgattccaggcaatttatccaaggaagaggaggaactgtcttcccagatgtccagctttaacgaagccatgactcagatcagggagctggaggagaaggctatggaagagctcaaggagatcatacagcaaggaccagactggcttgagctctctgagatgaccgagcagccagactatgacctggagacctttgtgaacaaagcggaatctgctctggcccagcaagccaagcatttctcagccctgcgagatgtcatcaaggccttgcgcctggccatgcagctggaagagcaggctagcagacaaataagcagcaagaaacggccccagtga

SEQ ID NO: 891 - DNA, 885 bp, Homo Sapiens
atggagtatcccgcgccggccacggtgcaggccgcggacggcggagcggccgggccttacagcagctcggagttgctggagggccaggagccggacggggtgcgctttgaccgcgagagggcgcgccgcctgtgggaagccgtgtccggtgcccagccggtgggtagagaggaagtggagcacatgatccagaagaaccaatgtctcttcaccaacacccagtgtaaggtttgctgcgccttgcttatttctgagtcccagaagctggcacattaccagagcaaaaaacatgccaacaaagtgaagagatacctagcaatccatggaatggagacattaaagggggaaacgaagaagctagactcagatcagaagagcagcagaagcaaagacaagaaccagtgctgccccatctgtaacatgaccttttcctcccctgtcgtggcccagtcgcactacctggggaagacccacgcaaagaacttaaagctgaagcagcagtccactaaggtggaagccttgcaccagaatagagagatgatagacccagacaagttctgcagcctctgccatgcaactttcaacgaccctgtcatggctcaacaacattatgtgggcaagaaacacagaaaacaggagaccaagctcaaactaatggcacgctatgggcggctggcggaccctgctgtcactgactttccagctggaaagggctacccctgcaaaacatgtaagatagtgctgaactccatagaacagtaccaagctcatgtcagcggcttcaaacacaagaaccagtcaccaaaaacagtggcatcatccctgggccagattccaatgcaaaggcaacccattcagaaagactcaaccaccttggaagactag

SEQ ID NO: 892 - DNA, 2391 bp, Homo Sapiens
atgcctacaacacagcagtcccctcaggatgagcaggaaaagctcttggatgaagccatacaggctgtgaaggtccagtcattccaaatgaagagatgcctggacaaaaacaagcttatggatgctctaaaacatgcttctaatatgcttggtgaactccggacttctatgttatcaccaaagagttactatgaactttatatggccatttctgatgaactgcactacttggaggtctacctgacagatgagtttgctaaaggaaggaaagtggcagatctctacgaacttgtacagtatgctggaaacattatcccaaggctttaccttttgatcacagttggagttgtatatgtcaagtcatttcctcagtccaggaaggatattttgaaagatttggtagaaatgtgccgtggtgtgcaacatcccttgaggggtctgtttcttcgaaattaccttcttcagtgtaccagaaatatcttacctgatgaaggagagccaacagatgaagaaacaactggtgacatcagtgattccatggattttgtactgctcaactttgcagaaatgaacaagctctgggtgcgaatgcagcatcagggacatagccgagatagagaaaaaagagaacgagaaagacaagaactgagaattttagtgggaacaaatttggtgcgcctcagtcagttggaaggtgtaaatgtggaacgttacaaacagattgttttgactggcatattggagcaagttgtaaactgtagggatgctttggctcaagaatatctcatggagtgtattattcaggttttccctgatgaatttcacctccagactttgaatccttttcttcgggcctgtgctgagttacaccagaatgtaaatgtgaagaacataatcattgctttaattgatagattagctttatttgctcaccgtgaagatggacctggaatcccagcggatattaaactttttgatatattttcacagcaggtggctacagtgatacagtctagacaagacatgccttcagaggatgttgtatctttacaagtctctctgattaatcttgccatgaaatgttaccctgatcgtgtggactatgttgataaagttctagaaacaacagtggagatattcaataagctcaaccttgaacatattgctaccagtagtgcagtttcaaaggaactcaccagacttttgaaaataccagttgacacttacaacaatattttaacagtcttgaaattaaaacattttcacccactctttgagtactttgactacgagtccagaaagagcatgagttgttatgtgcttagtaatgttctggattataacacagaaattgtctctcaagaccaggtggattccataatgaatttggtatccacgttgattcaagatcagccagatcaacctgtagaagaccctgatccagaagattttgctgatgagcagagccttgtgggccgcttcattcatctgctgcgctctgaggaccctgaccagcagtacttgattttgaacacagcacgaaaacattttggagctggtggaaatcagcggattcgcttcacactgccacctttggtatttgcagcttaccagctggcttttcgatataaagagaattctaaagtggatgacaaatgggaaaagaaatgccagaagattttttcatttgcccaccagactatcagtgctttgatcaaagcagagctggcagaattgcccttaagactttttcttcaaggagcactagctgctggggaaattggttttgaaaatcatgagacagtcgcatatgaattcatgtcccaggcattttctctgtatgaagatgaaatcagcgattccaaagcacagctagctgccatcaccttgatcattggcacttttgaaaggatgaagtgcttcagtgaagagaatcatgaacctctgaggactcagtgtgcccttgctgcatccaaacttctaaagaaacctgatcagggccgagctgtgagcacctgtgcacatctcttctggtctggcagaaacacggacaaaaatggggaggagcttcacggaggcaagagggtaatggagtgcctaaaaaaagctctaaaaatagcaaatcagtgcatggacccctctctacaagtgcagctttttatagaaattctgaacagatatatctatttttatgaaaaggaaaatgatgcggtaacaattcaggttttaaaccagcttatccaaaagattcgagaagacctcccgaatcttgaatccagtgaagaaacagagcagattaacaaacattttcataacacactggagcatttgcgcttgcggcgggaatcaccagaatccgaggggccaatttatgaaggtctcatcctttaa

SEQ ID NO: 893 - DNA, 2088 bp, Homo Sapiens
atggactgctacacggcgaactggaacccactcggggactctgccttttaccggaaatatgagctgtacagcatggactgggacctgaaggaggaactcagggattgcctggtggctgctgcaccctatgggggccccattgcactgctgaggaacccctggcggaaggagaaagctgctagtgtgaggccagtgctcgatatatactctgcttccggcatgcctctggccagcctgctgtggaagagtggacccgtggtgtccctgggctggtcagctgaggaggagctgctctgtgtgcaggaagatggtgctgtactggtttatgggcttcatggtgacttccggagacacttcagcatgggcaatgaagtgctccagaaccgggttctggatgcccggatctttcacactgagtttggttccggagtggccatcctcacaggggcccaccgcttcaccctcagtgccaatgtgggtgacctcaaactccgccggatgccagaggtgccaggtctgcaaagtgcaccctcctgctggactgtgctgtgccaggaccgagtggcacacattcttctggctgtggggcctgacctttacctcttggaccatgcagcctgctccgcagtgacgccccctggcctggccccaggagtaagcagcttcctacagatggctgtctccttcacctaccgacacctggcactcttcacagacacaggctacatctggatggggacagcatcactcaaggagaagctatgtgagttcaactgcaacatccgggcacctccaaagcagatggtctggtgcagccgtcctcgtagcaaggagagggccgtggtggtggcctgggaaaggcggctgatggtggtgggcgatgcacccgagagcatccaatataagcagctcaccatccaggtgctgctggacaggctcgtgttgcggagactttaccccctggccatccagatatgcgagtacttgcgccttcctgaagtacagggcgtcagcaggatcctggcccactgggcctgctacaaggtgcaacagaaggatgtctcagatgaggatgtggctcgagccattaaccagaagctgggggacacgcctggtgtctcttactccgacattgctgcacgagcctatggttgtggccgcacggagctggccatcaagctgctggagtatgagccacgctcaggggagcaggtaccccttctcctaaagatgaagaggagcaaactggcactaagcaaggccatcgagagcggggacactgacctggtgttcacggtgttgctgcacctgaagaacgagctgaaccgaggagattttttcatgacccttcggaatcagcccatggccctcagtttgtaccgacagttctgtaagcatcaggagctagagacgctgaaggacctttacaatcaggatgacaatcaccaggaattgggcagcttccacatccgagccagctatgctgcagaagagcgtattgaggggcgagtagcagctctgcagacagccgccgatgccttctacaaggccaagaatgagtttgcagccaaggctacagaggatcaaatgcggctcctacggctgcagcggcgcctagaagacgagctggggggccagttcctagacctgtctctacatgacacagttaccaccctcattcttggcggtcacaacaagcgtgcagagcagctggcacgtgacttccgcatccctgacaagaggctctggtggctgaagctgactgccctggcagatttggaagattgggaagagctagagaagttttccaagagcaagaaatcacccattggctacctgccttttgtggagatctgcatgaaacaacataacaaatacgaagccaagaagtatgcttcccgcgtgggtcccgagcagaaggtcaaggctttgcttcttgttggcgatgtggctcaggctgcagatgtggccatcgaacaccggaatgaggctgagctgagcctcgtattgtcccactgcacgggagccacagatggggccacagctgacaagattcaacgggccagggcacaagcccagaagaagtga

SEQ ID NO: 894 - DNA, 402 bp, Homo Sapiens
atgctatcacccgaggcagagcgagtgctgcggtaccttgtagaagtggaggagctcgccgaggaggtgctggcggacaagcggcagattgtggacctggacactaaaaggaatcagaatcgagagggcctgagggccctgcagaaggatctcagcctctctgaagatgtgatggtttgcttcgggaacatgtttatcaagatgcctcaccctgagacaaaggaaatgattgaaaaagatcaagatcatctggataaagaaatagaaaaactgcggaagcaacttaaagtgaaggtcaaccgcctttttgaggcccaaggcaaaccggagctgaagggttttaacttgaaccccctcaaccaggatgagcttaaagctctcaaggtcatcttgaaaggatga

SEQ ID NO: 895 - DNA, 2529 bp, Homo Sapiens
atggacttccaagagagggacccgcccttcctgcctgagagcgctcagtcctcaaagcccagcagtgctcagcaggcctctgagctgtgggaggtggtggaggagcctcgggtcaggctggggacagagggtgtcatgcctgagaggcaggaaggtcacctgctcaagaagaggaagtggcctctgaagggctggcacaagagatactttgtgctcgaggacgggatccttcattatgcaacaacccggcaagacatcaccaaggggaagctccatggctccatcgatgtccggctgtcggtcatgtccatcaacaaaaaggcccagcgcattgaccttgacactgaagacaacatctaccacctcaagatcaaatcccaggacctattccagagctgggtggcgcagctgcgtgcccaccgcctagcccaccgcctggacatgccccgtggctcactgcccagtactgctcaccggaaggttcctggtgcccagcttccaacagcagctactgcctcagccctacctgggcttggaccgcgggagaaagtgtcttcctggctgagggacagtgatgggctggaccgctgctctcatgagctctctgagtgtcaggggaagctccaggaactacacaggctcctccagagcctggagtccctgcaccgaatcccctcagcccctgttatccccacacaccaggcctcagtgacaaccgaaagacccaagaaggggaaacggacaagccgcatgtggtgcacccagagctttgccaaggatgacaccattggacgggttggtcgtctccatggctctgttcccaacctgtctcgctacctggagtctcgggactcctcgggcacccgtgggctgccacccacagactatgcccacctgcagcgcagcttctgggccctggcccagaaggtgcacagctccctcagcagcgtcctggccgccctcaccatggaacgggaccaactgagggacatgcaccagggctcagagttgtcaagaatgggggtctctgaggcctccactggccagaggcgcctccactcactgtccacctcctccgacaccacggcggactctttcagctccctcaaccctgaggagcaagaagctctgtacatgaaggggcgcgagctcaccccccagctatcgcagaccagcatcctgtcccttgctgattcccacacggagttcttcgatgcctgcgaggttctcctctccgccagctcttctgagaatgagggctcagaggaggaggagtcctgtaccagtgaaatcaccaccagcctgtctgaggagatgctggacctcaggggagctgagcgctgtcagaaaggggggtgtgttccagggagacccatggggccaccccgccgtcgctgcctgccggcggccagcgggcctggggctgacgtgagcctgtggaacattctgcgcaacaacatcggcaaagacctgtccaaggtgtcaatgcctgtgcagctcaacgagccgctcaacactctgcagcggctctgcgaggagctggagtacagcagcctcctggaccaggccagccgcatcgccgacccctgcgagcgcatggtgtacatcgcagcctttgctgtctcggcctactcctccacataccaccgagccggctgcaagcccttcaaccctgtcctgggggagacctacgagtgtgagcggcctgaccgaggcttccgcttcatcagtgagcaggtctcccaccacccccctatctcggcctgccatgcagagtctgagaacttcgccttctggcaagatatgaagtggaagaacaagttctggggcaaatccctggagattgtgcctgtgggaacagtcaacgtcagcctgcccaggtttggggaccactttgagtggaacaaggtgacatcctgcattcacaatgtcctgagtggtcagcgctggatcgagcactatggggaggtgctcatccgaaacacacaggacagctcctgccactgcaagatcaccttctgcaaggccaagtactggagttccaatgtccacgaggtgcagggcgctgtgctcagtcggagtggccgtgtcctccaccgactctttgggaagtggcacgaggggctgtaccggggacccacgccaggtggccagtgcatctggaaacccaactcaatgccccccgaccatgagcgaaacttcggcttcacccagtttgccttggagctgaatgagctgacagcagagctgaaacggtcgctgccttccaccgacacgagactccggccagaccagaggtacctggaggaggggaacatacaggccgctgaggcccagaagagaaggatcgagcagctgcagcgagacaggcgcaaagtcatggaggaaaacaacatcgtacaccaggctcgcttcttcaggcggcagacggatagcagcgggaaagagtggtgggtgaccaacaatacctactggaggctgcgggccgagccaggctatgggaacatggatggggccgtgctctggtag

SEQ ID NO: 896 - DNA, 912 bp, Homo Sapiens
atggcgctggacttcttggctggatgcgcggggggtgtggcaggcgtgcttgtgggacacccgtttgacacggtcaaggtacggcttcaggtccagagcgtggagaagcctcagtaccgcgggacgttgcactgcttcaagtccatcatcaagcaagagagcgtgctgggcctgtacaagggcctgggctcgccgctcatggggctcaccttcatcaacgcgctggtgttcggggtgcagggcaacaccctccgggccctgggccacgactcgcccctcaaccagttcctggcaggtgcggcggcgggcgccatccagtgcgtcatctgctgccccatggagctggccaagacgcggctgcagctgcaggacgcgggcccagcgcgcacctacaagggctcgctggactgcctcgcgcagatctacgggcacgagggtctgcgtggcgtcaaccggggcatggtgtccacgttgctgcgtgagacgcccagcttcggcgtctacttcctcacctatgacgctctcacgcgggcgctgggctgcgagccgggcgaccgcctgctggtgcccaagctgctgttggcgggcggtacgtcaggcatcgtgtcctggctctctacctatcctgtggacgtggtcaagtcgcggctgcaggcggacggactgcggggcgccccgcgctaccgcggcatcctggactgcgtgcaccagagctaccgcgccgagggctggcgcgtcttcacacgggggctggcgtccacgctgctgcgcgccttccccgtcaacgctgccaccttcgccaccgtcacggtggtgctcacctacgcgcgcggcgaggaggccgggcccgagggcgaggctgtgcccgccgcccctgcggggcctgccctggcgcagccctccagcctgtga

SEQ ID NO: 897 - DNA, 873 bp, Homo Sapiens
atggccgccctgcgtgtcctgctgtcctgcgtccgcggcccgctgaggcccccggttcgctgtcccgcctggcgtcccttcgcctcgggtgctaactttgagtacatcatcgcagaaaaaagagggaagaataacaccgtggggttgatccaactgaaccgccccaaggccctcaatgcactttgcgatggcctgattgacgagctcaaccaggccctgaagaccttcgaggaggacccggccgtgggggccattgtcctcaccggcggggataaggcctttgcagctggagctgatatcaaggaaatgcagaacctgagtttccaggactgttactccagcaagttcttgaagcactgggaccacctcacccaggtcaagaagccagtcatcgctgctgtcaatggctatgcctttggcgggggctgtgagcttgccatgatgtgtgatatcatctatgccggtgagaaggcccagtttgcacagccggagatcttaataggaaccatcccaggtgcgggcggcacccagagactcacccgtgctgttgggaagtcgctggcgatggagatggtcctcactggtgaccggatctcagcccaggacgccaagcaagcaggtcttgtcagcaagatttgtcctgttgagacactggtggaagaagccatccagtgtgcagaaaaaattgccagcaattctaaaattgtagtagcgatggccaaagaatcagtgaatgcagcttttgaaatgacattaacagaaggaagtaagttggagaagaaactcttttattcaacctttgccactgatgaccggaaagaagggatgaccgcgtttgtggaaaagagaaaggccaacttcaaagaccagtga

SEQ ID NO: 898 - DNA, 2922 bp, Homo Sapiens
atgattggtcgctgctttgtgctcagccaggacctggccatccgggatgagttggatggtggggaatggaagttctgtgagggacgcccccaaggccatgaacaatttgggttctgccagcagggcacagctgccgccttctcccctgatagccactacctcctctttggggccccaggaacctataattggaaggggttgctttttgtgaccaacattgatagctcagaccccgaccagctggtgtataaaactttggaccctgctgaccggctcccaggaccagccggagacttggccctcaatagctacttaggcttctctattgactcggggaaaggtctggtgcgtgcagaagagctgagctttgtggctggagccccccgcgccaaccacaagggtgctgtggtcatcctgcgcaaggacagcgccagtcgcctggtgcccgaggttatgctgtctggggagcgcctgacctccggctttggctactcactggctgtggctgacctcaacagtgatggctggccagacctgatagtgggtgccccctacttctttgagcgccaagaagagctggggggtgctgtgtatgtgtacttgaaccaggggggtcactgggctgggatctcccctctccggctctgcggctcccctgactccatgttcgggatcagcctggctgtcctgggggacctcaaccaagatggctttccagatattgcagtgggtgccccctttgatggtgatgggaaagtcttcacctaccatgggagcagcctgggggttgtcgccaaaccttcacaggtgctggagggcgaggctgtgggcatcaagagcttcggctactccctgtcaggcagcttggatatggatgggaaccaataccctgacctgctggtgggctccctggctgacaccgcagtgctcttcagggccagacccatcctccatgtctcccatgaggtctctattgctccacgaagcatcgacctggagcagcccaactgtgctggcggccactcggtctgtgtggacctaagggtctgtttcagctacattgcagtccccagcagctatagccctactgtggatgcggacacagaccggaggctccggggccaggttccccgtgtgacgttcctgagccgtaacctggaagaacccaagcaccaggcctcgggcaccgtgtggctgaagcaccagcatgaccgagtctgtggagacgccatgttccagctccaggaaaatgtcaaagacaagcttcgggccattgtagtgaccttgtcctacagtctccagacccctcggctccggcgacaggctcctggccaggggctgcctccagtggcccccatcctcaatgcccaccagcccagcacccagcgggcagagatccacttcctgaagcaaggctgtggtgaagacaagatctgccagagcaatctgcagctggtccgcgcccgcttctgtacccgggtcagcgacacggaattccaacctctgcccatggatgtggatggaacaacagccctgtttgcactgagtgggcagccagtcattggcctggagctgatggtcaccaacctgccatcggacccagcccagccccaggctgatggggatgatgcccatgaagcccagctcctggtcatgcttcctgactcactgcactactcaggggtccgggccctggaccctgcggagaagccactctgcctgtccaatgagaatgcctcccatgttgagtgtgagctggggaaccccatgaagagaggtgcccaggtcaccttctacctcatccttagcacctccgggatcagcattgagaccacggaactggaggtagagctgctgttggccacgatcagtgagcaggagctgcatccagtctctgcacgagcccgtgtcttcattgagctgccactgtccattgcaggaatggccattccccagcaactcttcttctctggtgtggtgaggggcgagagagccatgcagtctgagcgggatgtgggcagcaaggtcaagtatgaggtcacggtttccaaccaaggccagtcgctcagaaccctgggctctgccttcctcaacatcatgtggcctcatgagattgccaatgggaagtggttgctgtacccaatgcaggttgagctggagggcgggcaggggcctgggcagaaagggctttgctctcccaggcccaacatcctccacctggatgtggacagtagggataggaggcggcgggagctggagccacctgagcagcaggagcctggtgagcggcaggagcccagcatgtcctggtggccagtgtcctctgctgagaagaagaaaaacatcaccctggactgcgcccggggcacggccaactgtgtggtgttcagctgcccactctacagctttgaccgcgcggctgtgctgcatgtctggggccgtctctggaacagcacctttctggaggagtactcagctgtgaagtccctggaagtgattgtccgggccaacatcacagtgaagtcctccataaagaacttgatgctccgagatgcctccacagtgatcccagtgatggtatacttggaccccatggctgtggtggcagaaggagtgccctggtgggtcatcctcctggctgtactggctgggctgctggtgctagcactgctggtgctgctcctgtggaagatgggattcttcaaacgggcgaagcaccccgaggccaccgtgccccagtaccatgcggtgaagattcctcgggaagaccgacagcagttcaaggaggagaagacgggcaccatcctgaggaacaactggggcagcccccggcaggagggcccggatgcacaccccatcctggctgctgacgggcatcccgagctgggccccgatgggcatccagggccaggcaccgcctag

SEQ ID NO: 899 - DNA, 306 bp, Homo Sapiens
atgtctgaccaggaggcaaaaccttcaactgaggacttgggggataagaaggaaggtgaatatattaaactcaaagtcattggacaggatagcagtgagattcacttcaaagtgaaaatgacaacacatctcaagaaactcaaagaatcatactgtcaaagacagggtgttccaatgaattcactcaggtttctctttgagggtcagagaattgctgataatcatactccaaaagaactgggaatggaggaagaagatgtgattgaagtttatcaggaacaaacggggggtcattcaacagtttag

SEQ ID NO: 900 - DNA, 978 bp, Homo Sapiens
atgaagccgatcctactgcagggccatgagcggtccattacgcagattaagtataaccgcgaaggagacctcctctttactgtggccaaggaccctatcgtcaatgtatggtactctgtgaatggtgagaggctgggcacctacatgggccataccggagctgtgtggtgtgtggacgctgactgggacaccaagcatgtcctcactggctcagctgacaacagctgtcgtctctgggactgtgaaacaggaaagcagctggcccttctcaagaccaattcggctgtccggacctgcggttttgactttgggggcaacatcatcatgttctccacggacaagcagatgggctaccagtgctttgtgagcttttttgacctgcgggatccgagccagattgacaacaatgagccctacatgaagatcccttgcaatgactctaaaatcaccagtgctgtttggggacccctgggggagtgcatcatcgctggccatgagagtggagagctcaaccagtatagtgccaagtctggagaggtgttggtgaatgttaaggagcactcccggcagatcaacgacatccagttatccagggacatgaccatgtttgtgaccgcgtccaaggacaacacagccaagctttttgactccacaactcttgaacatcagaagactttccggacagaacgtcctgtcaactcagctgccctctcccccaactatgaccatgtggtcctgggcggtggtcaggaagccatggatgtaaccacaacctccaccaggattggcaagtttgaggccaggttcttccatttggcctttgaagaagagtttggaagagtcaagggtcactttggacctatcaacagtgttgccttccatcctgatggcaagagctacagcagcggcggcgaagatggttacgtccgtatccattacttcgacccacagtacttcgaatttgagtttgaggcttaa

SEQ ID NO: 901 - DNA, 5943 bp, Homo Sapiens
atgaacccaactaatcctttcagtgggcagcagcctagtgctttttcggcgtcttctagtaatgtaggaacacttccatctaagccgccatttcgatttggtcaaccttctctttttggacaaaacagtaccttatctgggaagagctcgggattttcacaggtatccagctttccagcgtcttctggagtaagtcattcctcttcagtgcaaacattagggttcacccaaacctcaagtgttggacccttttctggacttgagcacacttccacctttgtggctacctctgggccttcaagttcatctgtgctgggaaacacaggatttagttttaaatcacccaccagtgttggggctttcccaagcacttctgcttttggacaagaagctggagaaatagtgaactctggttttgggaaaacagaattcagctttaaacctctggaaaatgcagtgttcaaaccaatactgggggctgaatctgagccagagaaaacccagagccaaattgcttctgggttttttacattttcccacccaattagtagtgcacctggaggcctggcccctttctcttttcctcaagtaacaagtagttcagctaccacttcaaattttaccttttcaaaacctgttagtagtaataattcattatctgcctttacccctgctttgtcaaaccaaaatgtagaggaagagaagagaggacctaagtcaatatttggaagttctaataatagcttcagtagcttccctgtatcatctgcggttttgggcgaacctttccaggctagcaaagcaggtgtcaggcaggggtgtgaagaagctgtttcccaggtggaaccacttcccagcctaatgaaaggactgaaaaggaaggaggaccaggatcgctccccaaggagacatggccacgagccagcagaagattcggatcctctgtcccggggcgatcatcctccagacaaacgacctgtccgcctgaatcgaccccggggaggtactttatttggtcggacgatacaggatgttttcaaaagcaataaggaagtaggtcgtctgggcaacaaggaggccaaaaaggaaactggctttgttgagtctgcagaaagtgaccacatggctatcccaggagggaatcagtctgtcctggcaccttcccggattccaggtgtgaataaagaggaagaaactgaaagtagagagaagaaagaagattctctaagaggaactccggcgcgtcagagtaacagaagcgagagcacagacagtcttgggggcttgtctccctctgaagtcacagccatccagtgcaagaacatccctgactacctcaacgacaggaccattctggagaaccattttggcaaaattgctaaagtgcagcgcatctttaccaggcgcagcaaaaagcttgcagtggtacatttctttgatcatgcatctgcagccctggctagaaagaaggggaaaagtttgcataaagacatggctatcttttggcacaggaagaaaataagccccaataagaaacccttttccctgaaggagaagaaaccaggtgacggtgaagtcagcccgagcacagaggatgcaccctttcagcactctcctcttggcaaggccgcagggaggactggtgctagcagcctcctgaataaaagctctccagtgaagaagccaagtcttctaaaggcccaccaattcgagggagactcttttgactcagcctccgagggctccgagggcctcgggccatgtgtgctctccctcagtaccctgataggcactgtggctgagacatccaaggagaagtaccgcctgcttgaccagagagacaggatcatgcggcaagctcgggtgaagagaaccgatctggacaaagcgaggacttttgttggcacctgcctggatatgtgtcctgagaaggagaggtacatgcgggagacccgtagccagctgagcgtgttcgaagtggtcccagggactgaccaggtggaccacgcagcagctgtgaaagagtacagtcggtcctcggcggatcaggaggagcccctgccccacgagctgcggcccttgccagtgctcagcaggaccatggactacctggtgacccagatcatggaccagaaggagggcagcctgcgggattggtatgacttcgtgtggaaccgcacgcgtggcatacggaaggatatcacgcagcagcacctctgtgaccccctgacggtgtccctgattgagaagtgcacccggtttcacatccactgtgcccacttcatgtgtgaggagcccatgtcctcctttgatgccaagatcaataatgagaacatgaccaagtgcctgcagagcctgaaggagatgtaccaggacctgagaaacaagggtgtcttctgtgccagcgaagcggagttccagggctacaatgttctgctcagtctcaacaagggagacatcctaagagaagtacaacagttccatcctgctgttagaaactcatctgaggtgaaatttgctgttcaggcttttgctgcattgaacagtaataattttgtgagatttttcaaactggtccagtcagcttcttacctgaacgcttgtcttttacactgttacttcagtcagatccgcaaggatgctctccgggcgctcaactttgcgtacacggtgagcacacagcgatctaccatctttcccctggatggtgtggtgcgcatgctgctgttcagagactgtgaagaggccaccgacttcctcacctgccacggcctcaccgtttccgacggctgtgtggagctgaaccggtctgcattcctggaaccagagggattatccaagaccaggaagtcggtgtttattactaggaagctgacggtgtcagtcggggaaattgtgaacggagggccattgccccccgtccctcgtcatacccctgtgtgcagcttcaactcccagaacaagtacatcggggagagcctggccgcggagctgcccgtcagcacccagagacccggctccgacacagtgggcggagggagaggagaggagtgtggtgtagagccggatgcacccctgtccagtctcccacagtctctaccagcccctgcgccctcaccagtgcctctgcctcctgtcctggcactgaccccgtctgtggcgcccagcctcttccagctgtctgtgcagcctgaaccaccgcctccagagcccgtgcccatgtactctgacgaggacctggcgcaggtggtggacgagctcatccaggaggccctgcagagggactgtgaggaagttggctctgcgggtgctgcctacgcagctgccgccctgggtgtttctaatgctgctatggaggatttgttaacagctgcaaccacgggcattttgaggcacattgcagctgaagaagtgtctaaggaaagagagcgaagggagcaggagaggcagcgggctgaagaggaaaggttgaaacaagagagagagctggtgttaagtgagctgagccagggcctggccgtggagctgatggaacgcgtgatgatggagtttgtgagggaaacctgctcccaggagttgaagaatgcagtagagacagaccagagggtccgtgtggcccgttgctgtgaggatgtctgtgcccacttagtggacttgtttctcgtggaggaaatcttccagactgcaaaggagaccctccaggagcttcagtgcttctgcaagtatctacagcggtggagggaagctgtcacagcccgcaagaaactgaggcgccaaatgcgggctttccctgctgcgccctgctgcgtggacgtgagcgaccggctgagggcgctggcgcccagcgcagagtgccccattgctgaagagaacctggccaggggcctcctggacctgggccatgcagggagattgggcatctcctgcaccaggttaaggcggctcagaaacaagacagctcaccagatgaaggttcagcacttctaccagcagctgctgagtgatgtggcatgggcgtctctggacctgccatccctcgtggctgagcacctccctgggaggcaggagcatgtgttttggaagctggtgctggtgttgccggatgtagaggagcagtccccagagagttgtggcagaattctagcaaattggttaaaagtcaagttcatgggagatgaaggctcagtggatgacacatccagcgatgctggtgggattcagacgctttcgcttttcaactcacttagcagcaaaggggatcagatgatttctgttaacgtgtgtataaaggtggcccatggcgccctcagtgatggtgccattgatgctgtggagacacagaaggacctcctgggagccagtgggctcatgctgctgcttccccccaaaatgaagagtgaggacatggcagaggaggacgtgtactggctgtcggccttgctgcagctcaagcagctcctgcaggctaagcccttccagcctgcgcttcctctggtggttcttgtgcctagcccaggaggggacgccgttgagaaggaagtagaagatggtctgatgctacaggacttggtttcagctaagctgatttcagattacactgttaccgagatccctgataccattaatgatctacaaggttcaactaaggttttgcaagcagtgcagtggctggtttcccactgcccccattcccttgacctctgctgccagactctcattcagtacgtcgaagacgggattggccatgagtttagtggccgctttttccatgacagaagagagaggcgtctgggcggtcttgcttctcaggagcctggcgccatcattgagctgtttaacagtgtgctgcagttcctggcttctgtggtgtcctctgaacagctgtgtgacctgtcctggcctgtcactgagtttgctgaggcagggggcagccggctgcttcctcacctgcactggaatgccccagagcacctggcctggctgaagcaggctgtgctcgggttccagcttccgcagatggaccttccacccctgggggccccctggctccccgtgtgctccatggttgtccagtacgcctcccagatccccagctcacgccagacacagcctgtcctccagtcccaggtggagaacctgctccacagaacctactgtaggtggaagagcaagagtccctccccagtccatggggcaggcccctcggtcatggagatcccatgggatgatcttatcgccttgtgtatcaaccacaagctgagagactggacgcccccccggcttcctgttacatcagaggcgctgagtgaagatggtcagatatgtgtgtatttttttaaaaacgatttgaaaaaatatgatgttcctttgtcgtgggaacaagccaggttgcagacgcagaaggagctacagctgagagagggacgtttggcaataaagccttttcatccttctgcaaacaattttcccataccattgcttcacatgcaccgtaactggaagaggagcacagagtgtgctcaagaggggaggattcccagcacagaggatctgatgcgaggagcttctgctgaggagctcttggcgcagtgtttgtcgagcagtctgctgctggagaaagaagagaacaagaggtttgaagatcagcttcagcaatggttgtctgaagactcaggagcatttacggatttaacttcccttcccctctatcttcctcagactctagtgtctctttctcacactattgaacctgtgatgaaaacatctgtaactactagcccacagagtgacatgatgagggagcaactgcagctgtcagaggcgacaggaacgtgtctaggcgaacgactaaagcacctggaaaggctgatccggagttcaagggaagaggaagttgcctctgagctccatctctctgcgctgctagacatggtggacatttga

SEQ ID NO: 902 - DNA, 1200 bp, Homo Sapiens
atggaggacggcgtctatgaacccccagacctgactccggaggagcggatggagctggagaacatccggcggcggaagcaggagctgctggtggagattcagcgcctgcgggaggagctcagtgaagccatgagcgaggtggaggggctggaggccaatgagggcagtaagaccttgcaacggaaccggaagatggcaatgggcaggaagaagttcaacatggaccccaagaaggggatccagttcttggtggagaatgaactgctgcagaacacacccgaggagatcgcccgcttcctgtacaagggcgaggggctgaacaagacagccatcggggactacctgggggagagggaagaactgaacctggcagtgctccatgcttttgtggatctgcatgagttcaccgacctcaatctggtgcaggccctcaggcagtttctatggagctttcgcctacccggagaggcccagaaaattgaccggatgatggaggccttcgcccagcgatactgcctgtgcaaccctggggttttccagtccacagacacgtgctatgtgctgtccttcgccgtcatcatgctcaacaccagtctccacaatcccaatgtccgggacaagccgggcctggagcgctttgtggccatgaaccggggcatcaacgagggcggggacctgcctgaggagctgctcaggaacctgtacgacagcatccgaaatgagcccttcaagattcctgaggatgacgggaatgacctgacccacaccttcttcaacccggaccgggagggctggctcctgaagctggggggccgggtgaagacgtggaagcggcgctggtttatcctcacagacaactgcctctactactttgagtacaccacggacaaggagccccgaggaatcatccccctggagaatctgagcatccgagaggtggacgacccccggaaaccgaactgctttgaactttacatccccaacaacaaggggcagctcatcaaagcctgcaaaactgaggcggacggccgagtggtggagggaaaccacatggtgtaccggatctcggcccccacgcaggaggagaaggacgagtggatcaagtccatccaggcggctgtgagtgtggaccccttctatgagatgctggcagcgagaaagaagcggatttcagtcaagaagaagcaggagcagccctga

SEQ ID NO: 903 - DNA, 582 bp, Homo Sapiens
atgttcaaaaacacgttccagagcggcttcctctccatcctctacagcatcggcagcaagcctctgcaaatctgggacaaaaaggtacggaatggccacatcaaaagaatcactgataatgacatccagtccctggtgctagagattgaagggacaaatgtaagcaccacatatatcacatgccctgcagaccccaagaagacgctgggaattaaacttcctttccttgtcatgattatcaaaaacctgaagaagtattttaccttcgaagtgcaggtactagatgacaagaatgtgcgtcgtcgctttcgggcaagtaactaccagagcaccacccgggtcaaacccttcatctgcaccatgcccatgcggctggatgacggctggaaccagattcagttcaacttgctagacttcacacggcgagcatacggcaccaattacatcgagaccctcagagtgcagatccatgcaaattgtcgcatccgacgggtttacttctcagacagactctactcagaagatgagctgccggcagagttcaaactgtatctcccagttcagaacaaggcaaagcaataa

SEQ ID NO: 904 - DNA, 1314 bp, Homo Sapiens
atggagaaagagctgcggagcaccattcttttcaatgcctacaaaaaggagatatttaccaccaacaatggctacaaatccatgcagaaaaaacttcggagtaattggaagattcagagcttaaaagatgaaatcacatctgagaagttaaatggagtaaaactgtggattacagctgggccaagggaaaaatttactgcagctgagtttgaaatcctgaagaaatatcttgacactggtggagatgtctttgtgatgctaggagaaggtggagaatccagatttgacaccaatattaactttttactagaagaatatggaatcatggttaataatgatgctgtggttagaaatgtatatcacaaatatttccatcctaaagaagctctagtttccagtggagtcttgaacagggaaattagccgagctgcaggaaaggctgtgcctgggatcattgatgaggaaagcagtggaaacaatgcccaggctctcacctttgtgtatccttttggtgccacattgagtgtcatgaaaccagcagtggcggttctgtctacaggttctgtctgcttcccacttaacagacccattttggctttctatcactcaaagaaccaaggtgggaagctggcagtgcttggttcatgtcacatgttcagtgatcaatatttggacaaagaagaaaacagcaaaatcatggatgttgttttccagtggctcacgacaggagacatccacctaaaccagattgatgctgaggacccagagatttctgactacatgatgctgccctacacagccaccctatcaaagcggaatcgagagtgtctccaggagagtgatgagatcccaagggactttaccaccctcttcgacctgtccatcttccagctggataccacctccttccacagcgtcatcgaggctcacgagcagctaaatgtgaaacatgaaccactccagctcatccagcctcagtttgagacgccgctgccaacccttcagcctgcggtttttcctcccagtttccgggagttaccacctcctcctctggagctatttgatttagatgaaacgttctcctctgagaaggcacggctggctcagattaccaataagtgtactgaagaagacctggaattttatgtcaggaagtgtggtgatattcttggagtaaccagtaaactaccaaaggaccaacaggatgccaaacatatccttgagcacgtcttcttccaagtggtggagttcaagaaattgaaccaggaacatgacatcgatacaagtgaaacagcattccagaacaatttctga

SEQ ID NO: 905 - DNA, 1317 bp, Homo Sapiens
atgggggaggcgcccagccccgcgcccgcgctctgggactgggactacctggaccgctgcttcgcccgccaccgcgtctgcatctccttcggcctgtggatctgcgcctcctcctgctggatcgccgcccacgcgctgcttctctatctgagatgtgcacagaaacccagacaggaccagtcggcactgtgtgctgcgtgctgcctcctgaccagtctgtgtgacaccgtcggggctcttctggccagacagctcacaatccaggttttcactggtgcctacctagcagctattgacttagtgaactttatgttcattctcttcccagtctgtggatccaaattcaagtctaattcagatcgggaagcccgagagaggaagaggaggcggcagctcagggccagtgtgtttgccctggccctgccgctgagcctgggcccgtgctgggctctgtgggttgctgtcccgaaggcttcagccaccatccgggggccacagcggaggctgctagcgagcctgctgcaggaaaatactgagatcctcggctacctgctgggtagcgttgctgcctttggctcctgggcttctcggatcccccctctctccagaatttgccgggggaagacatttccctccatccacctgtggacccggctcctgtcggccctggctggcctcctctatgcctcggccattgtggcccacgaccagcaccctgagtacctgctgcgggccacaccctggttcctgacctccctcggccgtgcggcactggacctcgctattattttcctttcgtgtgtgatgaagagcaagatgagacaggccttaggatttgccaaggaagccagagagagccctgacacccaagcccttttgacctgtgcagagaaagaggaagaaaaccaggagaatttggattgggtgcctctcaccacactgtcacactgcaagtcactgaggacaatgacagcaatcagtcgctacatggagctgaccatcgagcctgtgcagcaggcaggctgcagtgccaccaggctgccaggtgacgggcagacgagcgccggagatgcgtccctgcaggaccccccgtcgtaccctcccgttcaggtcatccgggcccgggtgtcttccggcagctcctctgaggtctcctccatcaactccgacctggagaagtattgggaggccctaaactcggagcagtgggaccctgaagatgtgaacctcgaaggcagcaaagaaaatgtggagctactgggatcccaggtgcaccaggactctgtgaggacagcacacctgagtgatgatgattaa

SEQ ID NO: 906 - DNA, 642 bp, Homo Sapiens
atggctgccccagcagtgtccgggctctcccggcaggtgcgatgcttcagtacctctgtggtcagaccatttgccaagcttgtgaggcctcctgttcaggtatacggtattgaaggtcgctatgccacagctctttattctgctgcatcaaaacagaataagctggagcaagtagaaaaggagttgttgagagtagcacaaatcctgaaggaacccaaagtggctgcttctgttttgaatccctatgtgaagcgttccattaaagtgaaaagcctaaatgacatcacagcaaaagagaggttctctcccctcactaccaatctgatcaatttgcttgctgaaaatggtcgattaagcaatacccaaggagtcgtttctgccttttctaccatgatgagtgtccatcgcggagaggtaccttgcacagtgacctctgcatctcctttagaagaagccacactctctgaattaaaaactgtcctcaagagcttcctaagtcaaggccaagtattgaaattggaggctaagactgatccgtcaatcttgggtggaatgattgtgcgcattggcgagaaatatgttgacatgtctgtcaagaccaagattcagaagctgggcagggctatgcgggagattgtctaa

SEQ ID NO: 907 - DNA, 1476 bp, Homo Sapiens
atggcgctgctctgggggctcctggtgctcagctggtcctgcctgcaaggcccctgctccgtgttctcccctgtgagcgccatggagcccttgggccggcagctaactagcgggccgaaccaggagcaggtgtccccacttaccctcctcaagttgggcaaccaggagcctggtggccagactgccctgaagagtcccccaggagtctgcagcagagaccccaccccagagcagacccacaggctggcccgggccatgatggccttcactgccgacctgttctccctggtggctcaaacgtccacctgccccaacctcatcctgtcacccctgagtgtggccctggcgctgtctcacctggcactaggtgctcagaaccacacgttgcagaggctgcaacaggtgctgcacgcaggctcagggccctgcctcccccatctgctgagccgcctctgccaggacctgggccccggcgcgttccgactggctgccaggatgtacctgcagaaaggatttcccatcaaagaagatttcctggaacaatccgaacagctatttggggcaaagcccgtgagcctgacgggaaagcaggaagatgacctggcaaacatcaaccaatgggtgaaggaggccacggaggggaagattcaggaattcctctctgggctgccggaagacaccgtgttgcttctcctcaacgccatccacttccagggtttctggaggaacaagtttgacccgagccttacccagagagactccttccacctggacgagcagttcacggtgcccgtggaaatgatgcaggcccgcacgtacccgctgcgctggttcttgctggagcagcctgagatccaggtggctcatttcccctttaagaacaacatgagctttgtggtccttgtacccacccactttgaatggaacgtgtcccaggtactggccaacctgagttgggacaccctgcacccacctctggtgtgggagaggcccaccaaggtccggctgcctaagctgtatctgaaacaccaaatggacctggtggccaccctcagccagctgggcctgcaggagttgttccaggccccagacctgcgtgggatctccgagcagagcctggtggtgtccggcgtgcagcatcagtccaccctggagctcagcgaggtcggcgtggaggcggcggcggccaccagcattgccatgtcccgcatgtccctgtcctccttcagcgtgaaccgccccttcctcttcttcatcttcgaggacaccacaggccttcccctcttcgtgggcagcgtgaggaaccccaaccccagtgcaccgcgggagctcaaggaacagcaggattccccgggcaacaaggacttcctccagagcctgaaaggcttcccccgcggagacaagcttttcggccctgacttaaaacttgtgccccccatggaggaggattacccccagtttggcagccccaagtga

SEQ ID NO: 908 - DNA, 996 bp, Homo Sapiens
atggagacggtcatttcttcagatagctccccagctgtggaaaatgagcatcctcaagagaccccagaatccaacaatagcgtgtatacttccttcatgaagtctcatcgctgctatgacctgattcccacaagctccaaattggttgtatttgatacgtccctgcaggtgaagaaagctttttttgctttggtgactaacggtgtacgagctgcccctttatgggatagtaagaagcaaagttttgtgggcatgctgaccatcactgatttcatcaatatcctgcaccgctactataaatcagccttggtacagatctatgagctagaagaacacaagatagaaacttggagagaggtgtatctccaggactcctttaaaccgcttgtctgcatttctcctaatgccagcttgtttgatgctgtctcttcattaattcggaacaagatccacaggctgccagttattgacccagaatcaggcaatactttgtacatcctcacccacaagcgcattctgaagttcctcaaattgtttatcactgagttccccaagccagagttcatgtccaagtctctggaagagctacagattggcacctatgccaatattgctatggttcgcactaccacccccgtctatgtggctctggggatttttgtacagcatcgagtctcagccctgccagtggtggatgagaaggggcgtgtggtggacatctactccaagtttgatgttatcaatctggcagcagaaaagacctacaacaacctagatgtatctgtgactaaagccttgcaacatcgatcacattactttgagggtgttctcaagtgctacctgcatgagactctggagaccatcatcaacaggctagtggaagcagaggttcaccgacttgtagtggtggatgaaaatgatgtggtcaagggaattgtatcactgtctgacatcctgcaggccctggtgctcacaggtggagagaagaagccctga

SEQ ID NO: 909 - DNA, 2829 bp, Homo Sapiens
atggccagcgacgccgtgcagagtgagcctcgcagctggtccctgctagagcagctgggcctggccggggcagacctggcggcccccggggtacagcagcagctggagctggagcgggagcggctgcggcgggaaatccgcaaggagctgaagctgaaggagggtgctgagaacctgcggcgggccaccactgacctgggccgcagcctgggccccgtagagctgctgctgcggggctcctcgcgccgcctcgacctgctgcaccagcagctgcaggagctgcacgcccacgtggtgcttcccgacccggcggccacccacgatggcccccagtcccctggtgcgggtggccccacctgctcggccaccaacctgagccgcgtggcgggcctggagaagcagttggccattgagctgaaggtgaagcagggggcggagaacatgatccagacctacagcaatggcagcaccaaggaccggaagctgctgctgacagcccagcagatgttgcaggacagtaagaccaagattgacatcatccgcatgcaactccgccgggcgctgcaggccggccagctggagaaccaggcagccccggatgacacccaagggagtcctgacctgggggctgtggagctgcgcatcgaagagctgcggcaccacttccgagtggagcacgcggtggccgagggtgccaagaacgtactgcgcctgctcagcgctgccaaggccccggaccgcaaggcagtcagcgaggcccaggagaaattgacagaatccaaccagaagctggggctgctgcgggaggctctggagcggagacttggggagctgcccgccgaccaccccaaggggcggctgctgcgagaagagctcgctgcggcctcctccgctgccttcagcacccgcctggccgggccctttcccgccacgcactacagcaccctgtgcaagcccgcgccgctcacagggaccctggaggtacgagtggtgggctgcagagacctcccagagaccatcccgtggaaccctaccccctcaatggggggacctgggaccccagacagccgcccccccttcctgagccgcccagcccggggcctttacagccgaagcggaagcctcagtggccggagcagcctcaaagcagaagccgagaacaccagtgaagtcagcactgtgcttaagctggataacacagtggtggggcagacgtcttggaagccatgtggccccaatgcctgggaccagagcttcactctggagctggaaagggcacgggaactggagttggctgtgttctggcgggaccagcggggcctgtgtgccctcaaattcctgaagttggaggatttcttggacaatgagaggcatgaggtgcagctggacatggaaccccagggctgcctggtggctgaggtcaccttccgcaaccctgtcattgagaggattcctcggctccgacggcagaagaaaattttctccaagcagcaagggaaggcgttccagcgtgctaggcagatgaacatcgatgtcgccacgtgggtgcggctgctccggaggctcatccccaatgccacgggcacaggcacctttagccctggggcttctccaggatccgaggcccggaccacgggtgacatatcggtggagaagctgaacctcggcactgactcggacagctcacctcagaagagctcgcgggatcctccttccagcccatcgagcctgagctcccccatccaggaatccactgctcccgagctgccttcggagacccaggagaccccaggccccgccctgtgcagccctctgaggaagtcacctctgaccctcgaagatttcaagttcctggcggtgctgggccggggtcattttgggaaggtgctcctctccgaattccggcccagtggggagctgttcgccatcaaggctctgaagaaaggggacattgtggcccgagacgaggtggagagcctgatgtgtgagaagcggatattggcggcagtgaccagtgcgggacaccccttcctggtgaacctcttcggctgtttccagacaccggagcacgtgtgcttcgtgatggagtactcggccggtggggacctgatgctgcacatccacagcgacgtgttctctgagccccgtgccatcttttattccgcctgcgtggtgctgggcctacagtttcttcacgaacacaagatcgtctacagggacctgaagttggacaatttgctcctggacaccgagggctacgtcaagatcgcagactttggcctctgcaaggaggggatgggctatggggaccggaccagcacattctgtgggaccccggagttcctggcccctgaggtgctgacggacacgtcgtacacgcgagctgtggactggtggggactgggtgtgctgctctacgagatgctggttggcgagtccccattcccaggggatgatgaggaggaggtcttcgacagcatcgtcaacgacgaggttcgctacccccgcttcctgtcggccgaagccatcggcatcatgagaaggctgcttcggaggaacccagagcggaggctgggatctagcgagagagatgcagaagatgtgaagaaacagcccttcttcaggactctgggctgggaagccctgttggcccggcgcctgccaccgccctttgtgcccacgctgtccggccgcaccgacgtcagcaacttcgacgaggagttcaccggggaggcccccacactgagcccgccccgcgacgcgcggcccctcacagccgcggagcaggcagccttcctggacttcgacttcgtggccgggggctgctag

SEQ ID NO: 910 - DNA, 2097 bp, Homo Sapiens
atgaggctcgccgtgggagccctgctggtctgcgccgtcctggggctgtgtctggctgtccctgataaaactgtgagatggtgtgcagtgtcggagcatgaggccactaagtgccagagtttccgcgaccatatgaaaagcgtcattccatccgatggtcccagtgttgcttgtgtgaagaaagcctcctaccttgattgcatcagggccattgcggcaaacgaagcggatgctgtgacactggatgcaggtttggtgtatgatgcttacctggctcccaataacctgaagcctgtggtggcagagttctatgggtcaaaagaggatccacagactttctattatgctgttgctgtggtgaagaaggatagtggcttccagatgaaccagcttcgaggcaagaagtcctgccacacgggtctaggcaggtccgctgggtggaacatccccataggcttactttactgtgacttacctgagccacgtaaacctcttgagaaagcagtggccaatttcttctcgggcagctgtgccccttgtgcggatgggacggacttcccccagctgtgtcaactgtgtccagggtgtggctgctccacccttaaccaatacttcggctactcgggagccttcaagtgtctgaaggatggtgctggggatgtggcctttgtcaagcactcgactatatttgagaacttggcaaacaaggctgacagggaccagtatgagctgctttgcctggacaacacccggaagccggtagatgaatacaaggactgccacttggcccaggtcccttctcataccgtcgtggcccgaagtatgggcggcaaggaggacttgatctgggagcttctcaaccaggcccaggaacattttggcaaagacaaatcaaaagaattccaactattcagctctcctcatgggaaggacctgctgtttaaggactctgcccacgggtttttaaaagtcccccccaggatggatgccaagatgtacctgggctatgagtatgtcactgccatccggaatctacgggaaggcacatgcccagaagccccaacagatgaatgcaagcctgtgaagtggtgtgcgctgagccaccacgagaggctcaagtgtgatgagtggagtgttaacagtgtagggaaaatagagtgtgtatcagcagagaccaccgaagactgcatcgccaagatcatgaatggagaagctgatgccatgagcttggatggagggtttgtctacatagcgggcaagtgtggtctggtgcctgtcttggcagaaaactacaataagagcgataattgtgaggatacaccagaggcagggtattttgctgtagcagtggtgaagaaatcagcttctgacctcacctgggacaatctgaaaggcaagaagtcctgccatacggcagttggcagaaccgctggctggaacatccccatgggcctgctctacaataagatcaaccactgcagatttgatgaatttttcagtgaaggttgtgcccctgggtctaagaaagactccagtctctgtaagctgtgtatgggctcaggcctaaacctgtgtgaacccaacaacaaagagggatactacggctacacaggcgctttcaggtgtctggttgagaagggagatgtggcctttgtgaaacaccagactgtcccacagaacactgggggaaaaaaccctgatccatgggctaagaatctgaatgaaaaagactatgagttgctgtgccttgatggtaccaggaaacctgtggaggagtatgcgaactgccacctggccagagccccgaatcacgctgtggtcacacggaaagataaggaagcttgcgtccacaagatattacgtcaacagcagcacctatttggaagcaacgtaactgactgctcgggcaacttttgtttgttccggtcggaaaccaaggaccttctgttcagagatgacacagtatgtttggccaaacttcatgacagaaacacatatgaaaaatacttaggagaagaatatgtcaaggctgttggtaacctgagaaaatgctccacctcatcactcctggaagcctgcactttccgtagaccttaa

SEQ ID NO: 911 - DNA, 1872 bp, Homo Sapiens
atggagagctaccacaagcctgaccagcagaagctgcaggccttgaaggacacggccaaccgcctacgtatcagctccatccaggccaccactgcggcgggctctggccaccccacgtcatgctgcagcgccgcagagatcatggctgtcctctttttccacaccatgcgctacaagtcccaggacccccggaatccgcacaatgaccgctttgtgctctccaagggccatgcagctcccatcctctacgcggtctgggctgaagctggtttcctggccgaggcggagctgctgaacctgaggaagatcagctccgacttggacgggcacccggtcccgaaacaagctttcaccgacgtggccactggctccctgggccagggcctcggggccgcttgtgggatggcctacaccggcaaatacttcgacaaggccagctaccgagtctattgcttgctgggagacggggagctgtcagagggctctgtatgggaggccatggccttcgccagcatctataagctggacaaccttgtggccattctagacatcaatcgcctgggccagagtgacccggccccactgcagcaccagatggacatctaccagaagcggtgcgaggccttcggttggcatgccatcatcgtggatggacacagcgtggaggagctgtgcaaggcctttggccaggccaagcaccagccaacagccatcattgccaagaccttcaagggccgagggatcacgggggtagaagataaggagtcttggcatgggaagcccctccccaaaaacatggctgagcagatcatccaggagatctacagccagatccagagcaaaaagaagatcctggcaacccctccacaggaggacgcaccctcagtggacattgccaacatccgcatgcccagcctgcccagctacaaagttggggacaagatagccacccgcaaggcctacgggcaggcactggccaagctgggccatgccagtgaccgcatcatcgccctggatggggacaccaaaaattccaccttctcggagatcttcaaaaaggagcacccggaccgcttcatcgagtgctacattgctgagcagaacatggtgagcatcgcggtgggctgtgccacccgcaacaggacggtgcccttctgcagcacttttgcagccttcttcacgcgggcctttgaccagattcgcatggccgccatctccgagagcaacatcaacctctgcggctcccactgcggcgtttccatcggggaagacgggccctcccagatggccctagaagatctggctatgtttcggtcagtccccacatcaactgtcttttacccaagtgatggcgttgctacagagaaggcagtggaactagccgccaatacaaagggtatctgcttcatccggaccagccgcccagaaaatgccatcatctataacaacaatgaggacttccaggtcggacaagccaaggtggtcctgaagagcaaggatgaccaggtgaccgttatcggggctggggtgaccctgcacgaggccttggccgctgccgaactgctgaagaaagaaaagatcaacatccgcgtgctggaccccttcaccatcaagcccctggacagaaaactcattctcgacagcgctcgtgccaccaagggcaggatcctcaccgtggaggaccattattatgaaggtggcattggtgaggctgtgtccagtgcagtagtgggcgagcctggcatcactgtcacccacctggcagttaaccgggtaccaagaagtgggaagccggctgagctgctgaagatgtttggtatcgacagggatgccattgcacaagctgtgaggggcctcatcaccaaggcctag

SEQ ID NO: 912 - DNA, 1020 bp, Homo Sapiens
atggctcaatacaagggcgccgcgagcgaggccggccgcgccatgcacctgatgaagaagcgggagaagcagcgcgagcagatggagcagatgaagcagcgcatcgcggaggagaacatcatgaaatccaacattgacaagaagttctctgcgcactacgacgcggtggaggcagagctcaagtccagcaccgtgggtctcgtgaccctgaatgacatgaaggccaagcaggaggctctggtgaaggagcgggagaagcagctggccaagaaggagcagtccaaggagctgcagatgaagctggagaagcttcgagagaaggagcgtaagaaggaagccaagcggaagatctccagcctgtccttcaccctggaggaggaagaagagggaggcgaggaggaagaggaggcggccatgtatgaggaggagatggaaagggaagagatcaccacgaagaagagaaaactggggaagaacccagacgttgacacaagcttcttgcctgatcgagaccgtgaggaggaggagaatcggcttcgggaagagctgcggcaggagtgggaagccaagcaggagaagatcaagagtgaggagatcgagatcaccttcagctactgggatggctctgggcaccggcggacagtcaagatgagaaagggcaacaccatgcagcagttcctgcagaaggcgctcgagatccttcggaaagacttcagtgagctgaggtccgcaggggtggagcagctcatgtacatcaaggaggacttgatcatccctcaccatcacagcttctacgacttcatcgtcaccaaggcacgggggaagagtggaccactcttcaactttgatgttcatgacgatgtgcggttgctcagtgacgccactgtggagaaggatgagtcccatgcaggcaaggtggtgctgaggagctggtacgagaagaacaagcacatctttcccgccagccgctgggaaccctacgaccctgaaaagaagtgggacaagtacacgatccgctga

SEQ ID NO: 913 - DNA, 5136 bp, Homo Sapiens
atgtcggccaaggtgcggctcaagaagctggagcagctgctcctggacgggccctggcgcaacgagagcgccctgagcgtggaaacgctgctcgacgtgctcgtctgcctgtacaccgagtgcagccactcggccctgcgccgcgacaagtacgtggccgagttcctcgagtgggctaaaccatttacacagctggtgaaagaaatgcagcttcatcgagaagactttgaaataattaaagtaattggaagaggtgcttttggtgaggttgctgttgtcaaaatgaagaatactgaacgaatttatgcaatgaaaatcctcaacaagtgggagatgctgaaaagagcagagaccgcgtgcttccgagaggagcgcgatgtgctggtgaacggcgactgccagtggatcaccgcgctgcactacgcctttcaggacgagaaccacctgtacttagtcatggattactatgtgggtggtgatttactgaccctgctcagcaaatttgaagacaagcttccggaagatatggcgaggttctacattggtgaaatggtgctggccattgactccatccatcagcttcattacgtgcacagagacattaaacctgacaatgtccttttggacgtgaatggtcatatccgcctggctgactttggatcatgtttgaagatgaatgatgatggcactgtgcagtcctccgtggccgtgggcacacctgactacatctcgccggagatcctgcaggcgatggaggacggcatgggcaaatacgggcctgagtgtgactggtggtctctgggtgtctgcatgtatgagatgctctatggagaaacgccgttttatgcggagtcactcgtggagacctatgggaagatcatgaaccatgaagagcgattccagttcccatcccatgtcacggatgtatctgaagaagcgaaggacctcatccagagactgatctgcagtagagaacgccggctggggcagaatggaatagaggatttcaaaaagcatgcgttttttgaaggtctaaattgggaaaatatacgaaacctagaagcaccttatattcctgatgtgagcagtccctctgacacatccaacttcgacgtggatgacgacgtgctgagaaacacggaaatattacctcctggttctcacacaggcttttctggattacatttgccattcattggttttacattcacaacggaaagctgtttttctgatcgaggctctctgaagagcataatgcagtccaacacattaaccaaagatgaggatgtgcagcgggacctggagcacagcctgcagatggaagcttacgagaggaggattcggaggctggaacaggagaagctggagctgagcaggaagctgcaagagtccacccagaccgtgcagtccctccacggctcatctcgggccctcagcaattcaaaccgagataaagaaatcaaaaagctaaatgaagaaatcgaacgcttgaagaataaaatagcagattcaaacaggctcgagcgacagcttgaggacacagtggcgcttcgccaagagcgtgaggactccacgcagcggctgcgggggctggagaagcagcaccgcgtggtccggcaggagaaggaggagctgcacaagcaactggttgaagcctcagagcggttgaaatcccaggccaaggaactcaaagatgcccatcagcagcgaaagctggccctgcaggagttctcggagctgaacgagcgcatggcagagctccgtgcccagaagcagaaggtgtcccggcagctgcgagacaaggaggaggagatggaggtggccacgcagaaggtggacgccatgcggcaggaaatgcggagagctgagaagctcaggaaagagctggaagctcagcttgatgatgctgttgctgaggcctccaaggagcgcaagcttcgtgagcacagcgagaacttctgcaagcaaatggaaagcgagctggaggccctcaaggtgaagcaaggaggccggggagcgggtgccaccttagagcaccagcaagagatttccaaaatcaaatccgagctggagaagaaagtcttattttatgaagaggaattggtcagacgtgaggcctcccatgtgctagaagtgaaaaatgtgaagaaggaggtgcatgattcagaaagccaccagctggccctgcagaaagaaatcttgatgttaaaagataagttagaaaagtcaaagcgagaacggcataacgagatggaggaggcagtaggtacaataaaagataaatacgaacgagaaagagcgatgctgtttgatgaaaacaagaagctaactgctgaaaatgaaaagctctgttcctttgtggataaactcacagctcaaaatagacagctggaggatgagctgcaggatctggcagccaagaaggagtcagtggcccactgggaagctcagattgcggaaatcattcagtgggtcagtgacgagaaagatgcccggggttaccttcaagctcttgcttccaagatgaccgaagagctcgaggctttgaggagttctagtctggggtcaagaacactggacccgctgtggaaggtgcgccgcagccagaagctggacatgtccgcgcggctggagctgcagtcggccctggaggcggagatccgggccaagcagcttgtccaggaggagctcaggaaggtcaaggacgccaacctcaccttggaaagcaaactaaaggattccgaagccaaaaacagagaattattagaagaaatggaaattttgaagaaaaagatggaagaaaaattcagagcagatactgggctcaaacttccagattttcaggattccatttttgagtatttcaacactgctcctcttgcacatgacctgacatttagaaccagctcagctagtgagcaagaaacacaagctccgaagccagaagcgtccccgtcgatgtctgtggctgcatcagagcagcaggaggacatggctcggcccccgcagaggccatccgctgtgccgttgcccaccacgcaggccctggctctggctggaccgaagccaaaagctcaccagttcagcatcaagtccttctccagccctactcagtgcagccactgcacctccctgatggttgggctgatccggcagggctacgcctgcgaggtgtgttcctttgcttgccacgtgtcctgcaaagacggtgccccccaggtgtgcccaatacctcccgagcagtccaagaggcctctgggcgtggacgtgcagcgaggcatcggaacagcctacaaaggccatgtcaaggtcccaaagcccacgggggtgaagaagggatggcagcgcgcatatgcagtcgtctgtgactgcaagctcttcctgtatgatctgcctgaaggaaaatccacccagcctggtgtcattgcgagccaagtcttggatctcagagatgacgagttttccgtgagctcagtcctggcctcagatgtcattcatgctacacgccgagatattccatgtatattcagggtgacggcctctctcttaggtgcaccttctaagaccagctcgctgctcattctgacagaaaatgagaatgaaaagaggaagtgggttgggattctagaaggactccagtccatccttcataaaaaccggctgaggaatcaggtcgtgcatgttcccttggaagcctacgacagctcgctgcctctcatcaaggccatcctgacagctgccatcgtggatgcagacaggattgcagtcggcctagaagaagggctctatgtcatagaggtcacccgagatgtgatcgtccgtgccgctgactgtaagaaggtacaccagatcgagcttgctcccagggagaagatcgtaatcctcctctgtggccggaaccaccatgtgcacctctatccgtggtcgtcccttgatggagcggaaggcagctttgacatcaagcttccggaaaccaaaggctgccagctcatggccacggccacactcaagaggaactctggcacctgcctgtttgtggccgtgaaacggctgatcctttgctatgagatccagagaacgaagccattccacagaaagttcaatgagattgtggctcccggcagcgtgcagtgcctggcggtgctcagggacaggctctgtgtgggctacccttctgggttctgcctgctgagcatccagggggacgggcagcctctaaacctggtaaatcccaatgacccctcgcttgcgttcctctcacaacagtcttttgatgccctttgtgctgtggagctcgaaagcgaggagtacctgctttgcttcagccacatgggactgtacgtggacccgcaaggccggagggcacgcgcgcaggagctcatgtggcctgcggctcctgtcgcctgtagttgcagccccacccacgtcacggtgtacagcgagtatggcgtggacgtctttgatgtgcgcaccatggagtgggtgcagaccatcggcctgcggaggataaggcccctgaactctgaaggcaccctcaacctcctcaactgcgagcctccacgcttgatctacttcaagagcaagttctcgggagcggttctcaacgtgccggacacctccgacaacagcaagaagcagatgctgcgcaccaggagcaaaaggcggttcgtcttcaaggtcccagaggaagagagactgcagcagaggcgagagatgcttagagacccagaattgagatccaaaatgatatccaacccaaccaacttcaaccacgtggcccacatgggcccaggcgacggcatgcaggtgctcatggacctgcctctgagtgctgtgcccccctcccaggaggaaaggccgggccccgctcccaccaacctggctcgccagcctccatccaggaacaagccctacatctcgtggccctcatcaggtggatcggagcctagcgtgactgtgcctctgagaagtatgtctgatccagaccaggactttgacaaagagcctgattcggactccaccaaacactcaactccatcgaatagctccaaccccagcggcccaccgagccccaactccccccacaggagccagctccccctcgaaggcctggagcagccggcctgtgacacctga

SEQ ID NO: 914 - DNA, 507 bp, Homo Sapiens
atgactgccactctccgcccctacctgagtgccgtgcgggccacattgcaggctgccctctgcctggagaacttctcctcccaggttgtggaacgacacaacaagccggaagtggaagtcaggagtagcaaagagctcctgttacaacctgtgaccatcagcaggaatgagaaggaaaaggttctgattgagggctccatcaactctgtccgggtcagcattgctgtgaaacaggctgatgagatcgagaagattttgtgccacaagttcatgcgcttcatgatgatgcgagcagagaacttctttatccttcgaaggaagcctgtggaggggtatgatatcagctttctgatcaccaacttccacacagagcagatgtacaaacacaagttggtggactttgtgatccacttcatggaggagattgacaaggagatcagtgagatgaagctgtcagtcaatgcccgtgcccgcattgtggctgaagagttccttaagaatttttaa

SEQ ID NO: 915 - DNA, 951 bp, Homo Sapiens
atgccccagacggtgatcctcccgggccctgcgccctggggcttcaggctctcagggggcatagacttcaaccagcctttggtcatcaccaggattacaccaggaagcaaggcggcagctgccaacctgtgtcctggagatgtcatcctggctattgacggctttgggacagagtccatgactcatgctgatgcgcaggacaggattaaagcagcagctcaccagctgtgtctcaaaattgacaggggagaaactcacttatggtctccacaagtatctgaagatgggaaagcccatcctttcaaaatcaacttagaatcagaaccacaggaattcaaacccattggtaccgcgcacaacagaagggcccagccttttgttgcagctgcaaacattgatgacaaaagacaggtagtgagcgcttcctataactcgccaattgggctctattcaactagcaatatacaagatgcgcttcacggacagctgcggggtctcattcctagctcacctcaaaacgagcccacagcctcggtgccccccgagtcggacgtgtaccggatgctccacgacaatcggaatgagcccacacagcctcgccagtcgggctccttcagagtgctccagggaatggtggacgatggctctgatgaccgtccggctggaacgcggagtgtgagagctccggtgacgaaagtccatggcggttcaggcggggcacagaggatgccgctctgtgacaaatgtgggagtggcatagtcggtgctgtggtgaaggcgcgggataagtaccggcaccctgagtgcttcgtgtgtgccgactgcaacctcaacctcaagcaaaagggctacttcttcatagaaggggagctgtactgcgaaacccacgcaagagcccgcacaaagcccccagagggctatgacacggtcactctgtatcccaaagcttaa

SEQ ID NO: 916 - DNA, 456 bp, Homo Sapiens
atgccgcgtggaagccgaagccgcacctcccgcatggcccctccggccagccgggcccctcagatgagagctgcacccaggccagcaccagtcgctcagccaccagcagcggcacccccatctgcagttggctcttctgctgctgcgccccggcagccaggtctgatggcccagatggcaaccactgcagctggcgtggctgtgggctctgctgtggggcacacattgggtcacgccattactgggggcttcagtggaggaagtaatgctgagcctgcgaggcctgacatcacttaccaggagcctcagggaacccagccagcacagcagcagcagccttgcctctatgagatcaaacagtttctggagtgtgcccagaaccagggtgacatcaagctctgtgagggtttcaatgaggtgctgaaacagtgccgacttgcaaacggattggcctaa

SEQ ID NO: 917 - DNA, 2034 bp, Homo Sapiens
atgggctcgcgctgccgggcgtgggcgtggactcgggcgtgggcactggcggagttccaagcccgggctgaggagggggcggcggcggcggcggcggcggcgggcgggtacccttcgactgggcgttgccgctgttccctgcgcggcatggaggggacggccgtggccgtgttcgagattttgagatttttaataattcactggaagtgtgacatagatgtatcaaagggagcattgctagaagggcagctagtgatttccatagaaggattaaattctaagcaccaggcaaatgctcttcattgtgtaacaactagatggagtctcactctgttacccaggccggagtgcagtggcgcagtctcggctcactgcaacctccacctcccaggttcaagtgattctcatgcctcagtcccccgagtagctgggattacagatgcccaccaccatgcctggctaattatggttgcttctgcaggaagcctttttggtggcatggtcctcaagaagttcctaaaagaaatacagtccatactgcccggaatctctgcaaagctgacttggacttcagaggaaggcagctattctcaggatatgacaggggtaacacccttccagatgatttttgaggttgatgaaaagcccagaaccttgatgacagattgtctggttataaagcattttttacgtaaaatcatcatggtgcaccctaaggtcagatttcatttcagtgtaaaggtaaatggaatcctctccacagagatctttggggtggagaatgaacccactttgaaccttgggaatggaattgctcttttggtcgactcccagcattatgtgagaccaaattttggtacaattgaatcacactgcagcagaattcaccctgtgctaggacatccagtaatgcttttcatccctgaagacgtggctggcatggacttgttgggagaactgatactgactccagcagctgcactgtgccccagcccaaaggtttcttccaaccagcttaacaggatttcttcagtttccatatttctatatggacctttgggtctgcctctgatattgtcaacttgggagcagccgatgactactttcttcaaagatacctcttctttagttgactggaaaaaataccatttgtgtatgatacccaatttggatctcaatttggatagagatttggtgcttccagatgtgagttatcaggtggaatccagtgaggaggatcagtctcagactatggatcctcaaggacaaactctgctgctttttctctttgtggatttccacagtgcatttccagtccagcaaatggaaatctggggagtctatactttgctcacaactcatctcaatgccatccttgtggagagccacagtgtagtgcaaggttccatccaattcactgtggacaaggtcttggagcaacatcaccaggctgccaaggctcagcagaaactacaggcctcactctcagtggctgtgaactccatcatgagtattctgactggaagcactaggagcagcttccgaaagatgtgtctccagacccttcaagcagctgacacacaagagttcaggaccaaactgcacaaagtatttcgtgagatcacccaacaccaatttcttcaccactgctcatgtgaggtgaagcagcagctaaccctagaaaaaaaggactcagcccagggcactgaggacgcacctgataacagcagcctggagctcctagcagataccagcgggcaagcagaaaacaagaggctcaagaggggcagcccccgcatagaggagatgcgagctctgcgctctgccagggccccgagcccgtcagaggccgccccgcgccgcccggaagccaccgcggcccccctcactcctagaggaagggagcaccgcgaggctcacggcagggccctggcgccgggcagggcgagcctcggaagccgcctggaggacgtgctgtggctgcaggaggtctccaacctgtcagagtggctgagtcccagccctgggccctga

SEQ ID NO: 918 - DNA, 1212 bp, Homo Sapiens
atggcgggagcagctacccaggcttccctggagtcggccccacggatcatgcggctggtggccgaatgcagccgctccagggcccgggcaggcgagctgtggctgccgcatgggacagtggccactcctgtgttcatgccagtgggcacgcaggccaccatgaagggcatcacgaccgaacagctggacgctctgggttgccgcatctgcctgggcaatacctaccatctgggtctaaggccgggacccgagctgatccagaaagccaacggtctccacggcttcatgaattggcctcataatctgctaacggacagcggcggtttccagatggtgtcgctggtgtctctgtccgaggtgacggaggagggcgtccgcttccgctccccctacgacggcaatgagaccctgctgagcccggagaaatccgtgcagatccagaatgcgctgggctcggacatcatcatgcagctggacgacgtggttagcagtactgtgactgggccacgtgtggaggaggccatgtacaggtcaatccgctggctggaccggtgcattgcagcccatcagcggccggacaagcagaacctcttcgccattatccagggtgggctggacgcagatctccgggccacctgccttgaagagatgaccaagcgagacgtgcctggcttcgccatcgggggcctgagcgggggtgagagcaagtcgcagttctggcggatggtggcgctgagcacctctcggctgccgaaggacaagccccgatatctgatgggggttggctatgccactgatctggtagtctgcgtggctcttggatgtgacatgttcgactgcgtcttccccacacggacagcgcgctttggctctgccctggtgcccactgggaacctgcagttgaggaagaaggtgtttgagaaggacttcggccccatagacccggagtgcacctgccccacgtgccaaaagcacagccgcgccttcctgcacgcactgctgcacagtgacaacacggccgcgctgcaccacctcacggtccacaacatcgcctaccagctgcagctcatgagcgccgtccgcaccagcatcgtggagaagcgcttcccggacttcgtgcgggacttcatgggcgccatgtacggggatcccaccctctgtcccacctgggccactgacgctctggcctctgtgggaatcacactgggctga

SEQ ID NO: 919 - DNA, 2685 bp, Homo Sapiens
atgaactccatgaaccccatgaaacctgccctgccccctgcgccacacggtgatggttcattcgcatatgagtctgtgccttggcaacaaagcgccactcagccggctggatcgctgtctgtggtcactactgtgtggggagttggcaacgcgacacagagccaggttttggggaaccccatgggccctgcagggagtccctctggcagctccatgatgcctggtgtggcagggggcagctccgccttgacctccccacagtgcctgggacagcaggcgtttgctgaaggcggcgccaacaagggctacgtgcagcaaggcgtgtacagccgcgggggctaccctggggcccccggcttcaccaccgggtatgcaggcggcccggggggcctgggcctcccctcacatgctgcaagaccctccactgacttcacgcaagcggcagctgctgcagctgtggctgctgcggcagccactgccaccgccacagccacagccaccgtggctgctctccaggagaagcagagccaggagctgagccagtatggagcgatgggggccggacagtcttttaacagccagtttctgcagcatggaggtccccgggggcctagtgtccccgctggcatgaaccctactggcataggaggggtaatgggcccctctggcctctcccccttggctatgaaccccacccgggcagcaggaatgacacccttgtatgcagggcagcgtctgccccaacatgggtatcctgggcctccccaggcccagccactgccccgacagggggtcaagagaacctactctgaggtgtatccagggcagcagtatctgcaaggaggccagtatgcacccagcaccgcccagtttgcgcccagccctgggcagccccctgccccctccccttcctaccctgggcacaggctgcccctgcagcagggcatgacccagtccctgtccgtgcctggccccacgggactgcattataagcctacccgttccatcccgggctatcccagttccccactgccagggaaccccacgccacccatgaccccaagcagcagcgtcccttacatgtcaccaaaccaagaggtcaagtctcccttcttgcctgatctcaagcccaacctcaactccttgcactcatcgccctctggaagcgggccttgtgacgagttgcggctgaccttccctgtgcgcgatggggtggtcctggagcccttccgcctgcagcacaacctggctgtaagcaaccatgtcttccagctgcgagactcagtctacaagaccctgataatgaggcctgacctggagctgcaattcaagtgctaccaccacgaggaccggcagatgaacaccaactggccagcctcggtgcaggtcagcgtcaatgccacgccgctcaccatcgagcgtggcgacaacaagacctcgcacaagccactctacctgaagcatgtgtgccagccaggccgcaacaccatccagatcaccgtcaccgcctgctgctgctcccacctcttcgtgctgcagctagtgcaccgcccatccgtccgctcggtgctgcagggcctcctcaaaaagcgcctcctgcctgctgagcactgcatcaccaagataaagcggaacttcagcagcggcaccatccctggcacccctgggcccaacggagaggacggggtggagcagacagctatcaaggtgtccctgaagtgccccatcaccttccgcaggatccagctccctgcccgaggtcatgactgtcgccacatacagtgctttgacctggagtcgtacctgcagctcaactgtgagcgggggacttggaggtgtcctgtgtgcaacaagacagctttgctggagggcctggaggtggaccagtacatgctgggcatcctgatttacattcagaactctgactatgaggagatcaccatcgaccccacgtgcagctggaagccagtgcccgtgaagcctgacatgcacatcaaggaggagccggatgggccagcactgaagcgctgccgcaccgtgagccccgcccacgtgctcatgcccagcgtgatggagatgatcgccgccctgggccccggcgctgccccctttgcccccctgcagcccccctcagtccctgcccccagcgactaccctggccagggttccagcttcctggggcctggaactttccctgagtccttcccacccaccacgcccagcaccccaacccttgctgagttcaccccgggaccaccccccatctcctaccagtctgacattcccagcagcctcctgacttcagagaagtctaccgcctgcctcccaagccagatggcaccagcaggtcacctggaccccactcacaatcctgggacaccaggactacacacctccaaccttggggcccctccaggtccccagctgcaccattcaaaccctcccccagcgtcccggcagtccttgggccaagcgagcttaggacctacgggtgaactggccttcagtcctgccacaggcgtgatggggccccccagcatgtctggagccggggaggccccagaaccagctctggacctgctcccggaactgaccaaccctgatgagctactgtcctacttgggcccacccgacctccctacgaacaacaatgacgacctgctttctctgtttgagaacaactga

SEQ ID NO: 920 - DNA, 963 bp, Homo Sapiens
atgtctaagtcagcgtctccaaaagagcccgaacagctgaggaagctcttcattggagggttgagctttgaaacaactgatgagagcctgaggagccattttgagcaatggggaacgctcacagactgtgtggtaatgagagatccaaacaccaagcgctccaggggctttgggtttgtcacatatgccactgtggaggaggtggatgcagctatgaatacaacgccacacaaggtggatggaagagttgtggaaccaaagagagctgtctccagagaagattctcaaagaccaggtgcccacttaactgtgaaaaagatatttgttggtggcattaaagaagacactgaagaacatcacctaagagattattttgaacagtatggaaaaattgaagtaattgaaatcatgactgaccgaggcagtggcaagaaaaggggctttgcctttgtaacctttgacgaccatgactccgtggataagattgtcattcagaaataccatactgtgaagggccacaactgtgaagttagaaaagccctgccaaagcaagagatggctagtgcttcatccagccaaagaggtcgaaggggttctggaaactttggtggtggtcgtggagatggtttcggtgggaatgacaactttggtcgtggaggaaacttcagtggtcgtggtggctttggtggcagctgtggtggtggtggatatggtggcagtggggatggctataatggatttggtaatgatggaagcaattttggaggtggtggaagctacaatgattttggcaattacaacaatcagtcttcaaattttggacccatgaagggaggaaattttggaggcagaagctctggcccctatggcggtggaggccaatactttgcaaaaccacaaaaccaaggtggctatggcgtttccagcagcagcagtagctatggcagtggcagaagattttaa

SEQ ID NO: 921 - DNA, 1992 bp, Homo Sapiens
atggggaacatactgacctgtcgtgtgcaccctagcgtcagcctcgagtttgaccagcagcaggggtcggtgtgtccctctgaatctgagatctatgaggcaggagctgaggacaggatggcaggagcgcccatggctgctgctgtacagcctgctgaggtgactgttgaagttggtgaggacctccacatgcaccacgttcgtgaccgggagatgcctgaagctttggagtttaacccttctgccaatccagaggcaagcacaatattccagaggaactctcaaacagatgttgtagaaataagaagaagcaactgtacaaaccatgtatctactgtgcatttcagtcaacaatacagcttgtgttcgacaatattccttgatgacagcacagccatccagcattatcttacaatgacaataatatctgtgaccttggagatacctcatcatatcacacaaagagatgcagatagatctttgagcatacctgatgaacagttacactcatttgcggtttccaccgtgcacattacgaagaacagaaatggaggtgggagtttaaataactattcctcctccattccatcgactcccagcaccagccaggaggaccctcagttcagtgttcctcccactgccaacacacccacccccgtttgcaagcggtccatgcgctggtccaacctgtttacatctgagaaagggagtgacccagacaaagagaggaaagccccggagaatcatgctgacaccatcgggagcggcagagccatccccattaaacagggcatgctcttaaagcgaagtgggaaatggctgaagacatggaaaaagaaatacgtcaccctgtgttccaatggtgtgctcacctattattcaagcttaggtgattatatgaagtatattcataaaaaagagattgaccttcagacatctaccatcaaagtcccaggaaagtggccatccctagccacattggcctgcacacccatctccagctctaaaagcgatggcctatccaaggacatggacaccgggctgggtgactccatatgcttcagccccagtatctccagcaccaccatccccaagctcaacccgcccccctctcctcatgccaataaaaagaaacacctaaagaagaaaagcaccaacaactttatgattgtgtctgccactggccaaacgtggcactttgaagccacgacatatgaggagcgggatgcatgggtccaagccatccagagccagatcctggccagcctgcagtcatgcgagagcagtaaaagcaagtcccagctgaccagccagagcgaggccatggccctgcagtcgatccaaaacatgcgtgggaacgcccactgtgtggactgtgagacccagaatcctaagtgggccagtttgaacttgggagtcctcatgtgtattgaatgctcaggtatccaccgcagtcttggcacccgcctttcccgtgtgcgatctctggagctggatgactggccagttgagctcaggaaggttatgtcatctattggcaatgacctagccaacagcatctgggaagggagcagccaggggcggacaaaacccacagaaaagtccacgagggaagagaaggaacggtggatccgttccaaatatgaggagaagctctttctggccccactaccctgcactgagctgtccctgggccagcagctgctgcgggccaccgctgatgaggacctgcagacagccatcctgctgctggcacatggctcccgtgaggaggtgaacgagacctgtggggagggagacggctgcacggcgctccatctggcctgccgcaaggggaatgtggtcctggcgcagctcctgatctggtacggggtggacgtcatggcccgagatgcccacgggaacacagcgctgacctacgcccggcaggcctccagccaggagtgcatcaacgtgcttctgcagtacggctgccccgacgagtgtgtgtag

SEQ ID NO: 922 - DNA, 1569 bp, Homo Sapiens
atggccctgctgccccgagccctgagcgccggcgcgggaccgagctggcggcgggcggcgcgcgccttccgaggcttcctgctgcttctgcccgagcccgcggccctcacgcgcgccctctcccgtgccatggcctgcaggcaggagccgcagccgcagggcccgccgcccgctgctggcgccgtggcctcctatgactacctggtgatcgggggcggctcgggcgggctggccagcgcgcgcagggcggccgagctgggtgccagggccgccgtggtggagagccacaagctgggtggcacttgcgtgaatgttggatgtgtacccaaaaaggtaatgtggaacacagctgtccactctgaattcatgcatgatcatgctgattatggctttccaagttgtgagggtaaattcaattggcgtgttattaaggaaaagcgggatgcctatgtgagccgcctgaatgccatctatcaaaacaatctcaccaagtcccatatagaaatcatccgtggccatgcagccttcacgagtgatcccaagcccacaatagaggtcagtgggaaaaagtacaccgccccacacatcctgatcgccacaggtggtatgccctccacccctcatgagagccagatccccggtgccagcttaggaataaccagcgatggattttttcagctggaagaattgcccggccgcagcgtcattgttggtgcaggttacattgctgtggagatggcagggatcctgtcagccctgggttctaagacatcactgatgatacggcatgataaggtacttagaagttttgattcaatgatcagcaccaactgcacggaggagctggagaacgctggcgtggaggtgctgaagttctcccaggtcaaggaggttaaaaagactttgtcgggcttggaagtcagcatggttactgcagttcccggtaggctaccagtcatgaccatgattccagatgttgactgcctgctctgggccattgggcgggtcccgaataccaaggacctgagtttaaacaaactggggattcaaaccgatgacaagggtcatatcatcgtagacgaattccagaataccaacgtcaaaggcatctatgcagttggggatgtatgtggaaaagctcttcttactccagttgcaatagctgctggccgaaaacttgcccatcgactttttgaatataaggaagattccaaattagattataacaacatcccaactgtggtcttcagccacccccctattgggacagtgggactcacggaagatgaagccattcataaatatggaatagaaaatgtgaagacctattcaacgagctttaccccgatgtatcacgcagttaccaaaaggaaaacaaaatgtgtgatgaaaatggtctgtgctaacaaggaagaaaaggtggttgggatccatatgcagggacttgggtgtgatgaaatgctgcagggttttgctgttgcagtgaagatgggagcaacgaaggcagactttgacaacacagtcgccattcaccctacctcttcagaagagctggtcacacttcgttga

SEQ ID NO: 923 - DNA, 1578 bp, Homo Sapiens
atgctgttgccgctgctgctgctgctacccatgtgctgggccgtggaggtcaagaggccccggggcgtctccctcaccaatcatcacttctacgatgagtccaagcctttcacctgcctggacggttcggccaccatcccatttgatcaggtcaacgatgactattgcgactgcaaagatggctctgacgagccaggcacggctgcctgtcctaatggcagcttccactgcaccaacactggctataagcccctgtatatcccctccaaccgggtcaacgatggtgtttgtgactgctgcgatggaacagacgagtacaacagcggcgtcatctgtgagaacacctgcaaagagaagggccgtaaggagagagagtccctgcagcagatggccgaggtcacccgcgaagggttccgtctgaagaagatccttattgaggactggaagaaggcacgggaggagaagcagaaaaagctcattgagctacaggctgggaagaagtctctggaagaccaggtggagatgctgcggacagtgaaggaggaagctgagaagccagagagagaggccaaagagcagcaccagaagctgtgggaagagcagctggctgctgccaaggcccaacaggagcaggagctggcggctgatgccttcaaggagctggatgatgacatggacgggacggtctcggtgactgagctgcagactcacccggagctggacacagatggggatggggcgttgtcagaagcggaagctcaggccctcctcagtggggacacacagacagacgccacctctttctacgaccgcgtctgggccgccatcagggacaagtaccggtccgaggcactgcccaccgaccttccagcaccttctgcccctgacttgacggagcccaaggaggagcagccgccagtgccctcgtcgcccacagaggaggaggaggaggaggaggaggaggaggaagaagaggctgaagaagaggaggaggaggaggattccgaggtgcagggggagcagcccaagccggccagccctgctgaggaagacaaaatgccgccctacgacgagcagacgcaggccttcatcgatgctgcccaggaggcccgcaacaagttcgaggaggccgagcggtcgctgaaggacatggaggagtccatcaggaacctggagcaagagatttcttttgactttggccccaacggggagtttgcttacctgtacagccagtgctacgagctcaccaccaacgaatacgtctaccgcctctgccccttcaagcttgtctcgcagaaacccaaactcgggggctctcccaccagccttggcacctggggctcatggattggccccgaccacgacaagttcagtgccatgaagtatgagcaaggcacgggctgctggcagggccccaaccgctccaccaccgtgcgcctcctgtgcgggaaagagaccatggtgaccagcaccacagagcccagtcgctgcgagtacctcatggagctgatgacgccagccgcctgcccggagccaccgcctgaagcacccaccgaagacgaccatgacgagctctag

SEQ ID NO: 924 - DNA, 264 bp, Homo Sapiens
atggctctcgccgtccgagtcgtttattgtggcgcttgaggctacaagtccaagtatcttcagctcaagaagaagttagaagatgagttccccggccgcctggacatctgcggcgagggaactccccaggccaccgggttctttgaagtgatggtagccgggaagttgattcactctaagaagaaaggcgatggctacgtggacacagaaagcaagtttctgaagttggtggccgccatcaaagccgccttggctcagggctaa

SEQ ID NO: 925 - DNA, 1320 bp, Homo Sapiens
ggcaaggacatcgagactcccgggctcccgcgccctctctccctccgcagtttggcccggctccacggtgggggcccagagcccccgccgccctccaaggacggggacgcggtgcagacgccgcagctctacaccaccttcctgccgcctccggagggcgtgcccccgccggagctggcctgcctgcccacccccgagtccacgccggagctgccggtcaagcacctccgcgccgccggggacccctgggagtggaaccagaacaggaacaacgccaaggagggtccgggccgctcacggggcgggcacgcggcgggcgggcccgcgccccgcgtgctggtgaggccaccgccgcccggctgtcccgggcaggccgtggaagtcaccaccctggaggaactgctgcgctacctgcacggcccgcagccgcccagaaagggggccgagccccccgcccctttaacctcgcgggcgctcccgccggagcccgcccccgccctcttgggcggccccagccccaggccccacgagtgcgcctcgccgctgaggctggacgtgccccccgagggcaggtgcgcctctgcccccgcccggcccgcgctctccgcccccgctccccggctgggcgtcggcggaggccggaggttgcctttctccggccaccgggccccccctgccctgctcactcgagtcccctcgggaggtccctccaggtactccgggggtcccgggaagcacctcctgtacctgggccggcccgagggctaccggggccgcgccctgaaaagggtggacgtcgagaagccccagttgtccctgaagcctcccctcgtcgggccctcctcccgccaggccgtcccgaacggcggccgtttcaacttttaaagggagcggtccacggcctccagcgtggggagcgcccgagtcctctcggccacgagctggacgctcttcaggacgtttcaccgccccctcgccccgcacctccagccttcccgactcgcagagtctcccgaggccccttttcgcctcgggtttatttattgactgtctttccccctgtcctcgacagaagagtgggaggtgagaagcccgtctcctcagtgagccagcatttcagggggagctggcggactcccactccccgctcccttccagccaagctgccttaactcgcccctcggggctcccccagagactgtgccccgggcgggccgcgcgcgctgtgtccagagtcctcgggcctcctgggtctgggacgtgcctctcctactgtgtaggagcctccgcttcccaatacagccgtgtctgcaaaaaaaa

SEQ ID NO: 926 - DNA, 378 bp, Homo Sapiens
atgccccgctacgagctggctttaatcctgaaagccatgcagcggccagagactgctgctactttgaaacgtacgatagaggccctgatggacagaggagcaatagtgagggacttggaaaacctgggtgaacgagcgcttccttataggatctctgcccacagtcagcagcacaacagaggcgggtatttcttggtggatttttatgcacccaccgcagctgttgaaagcatggtggagcacttgtctcgagatatagatgtgattagagggaatattgtcaaacaccctctgacccaggaactaaaagaatgtgaagggattgtcccagtcccactcgcagaaaaattatattccacaaagaagaggaagaagtga

SEQ ID NO: 927 - DNA, 468 bp, Homo Sapiens
atgtccgagtccaagagcggccccgagtatgcttcgtttttcgccgtcatgggcgcctcggccgccatggtcttcagcgccctgggcgctgcctatggcacagccaagagcggtaccggcattgcggccatgtctgtcatgcggccggagcagatcatgaagtccatcatcccagtggtcatggctggcatcatcgccatctacggcctggtggtggcagtcctcatcgccaactccctgaatgacgacatcagcctctacaagagcttcctccagctgggcgccggcctgagcgtgggcctgagcggcctggcagccggctttgccatcggcatcgtgggggacgctggcgtgcggggcaccgcccagcagccccgactattcgtgggcatgatcctgattctcatcttcgccgaggtgctcggcctctacggtctcatcgtcgccctcatcctctccacaaagtag

SEQ ID NO: 928 - DNA, 3837 bp, Homo Sapiens
atggcacagagcaagaggcacgtgtacagccggacgcccagcggcagcaggatgagtgcggaggcaagcgcccggcctctgcgggtgggctcccgtgtagaggtgattggaaaaggccaccgaggcactgtggcctatgttggagccacactgtttgccactggcaaatgggtaggcgtgattctggatgaagcaaagggcaaaaatgatggaactgttcaaggcaggaagtacttcacttgtgatgaagggcatggcatctttgtgcgccagtcccagatccaggtatttgaagatggagcagatactacttccccagagacacctgattcttctgcttcaaaagtcctcaaaagagagggaactgatacaactgcaaagactagcaaactgcggggactgaagcctaagaaggcaccgacagcccgaaagaccacaactcggcgacccaagcccacgcgcccagccagtactggggtggctggggccagtagctccctgggcccctctggctcagcgtcagcaggtgagctgagcagcagtgagcccagcaccccggctcagactccgctggcagcacccatcatccccacgccggtcctcacctctcctggagcagtccccccgcttccttccccatccaaggaggaggagggactaagggctcaggtgcgggacctggaggagaaactagagaccctgagactgaaacgggcagaagacaaagcaaagctaaaagagctggagaaacacaaaatccagctggagcaggtgcaggaatggaagagcaaaatgcaggagcagcaggccgacctgcagcggcgcctcaaggaggcgagaaaggaagccaaggaggcgctggaggcaaaggaacgctatatggaggagatggctgatactgctgatgccattgagatggccactttggacaaggagatggctgaagagcgggctgagtccctgcagcaggaggtggaggcactgaaggagcgggtggacgagctcactactgacttagagatcctcaaggctgagattgaagagaagggctcagatggcgctgcatccagttatcagctcaagcagcttgaggagcagaatgcccgcctgaaggatgccctggtgaggatgcgggatctttcttcctcagagaagcaggagcatgtgaagctccagaagctcatggaaaagaagaaccaagagctggaagttgtgaggcaacagcgggagcgtctgcaggaggagctaagccaggcagagagcaccattgatgagctcaaggagcaggtggatgctgctctgggtgctgaggagatggtggagatgctgacagatcggaacctgaatctggaagagaaagtgcgcgagttgagggagactgtgggagacttggaagcgatgaatgagatgaacgatgagctgcaggagaatgcacgtgagacagaactggagctgcgggagcagctggacatggcaggcgcgcgggttcgtgaggcccagaagcgtgtggaggcagcccaggagacggttgcagactaccagcagaccatcaagaagtaccgccagctgaccgcccatctacaggatgtgaatcgggaactgacaaaccagcaggaagcatctgtggagaggcaacagcagccacctccagagacctttgacttcaaaatcaagtttgctgagactaaggcccatgccaaggcaattgagatggaattgaggcagatggaggtggcccaggccaatcgacacatgtccctgctgacagccttcatgcctgacagcttccttcggccaggtggggaccatgactgcgttctggtgctgttgctcatgcctcgtctcatttgcaaggcagagctgatccggaagcaggcccaggagaagtttgaactaagtgagaactgttcagagcggcctgggctgcgaggagctgctggggagcaactcagctttgctgctggactggtgtactcgctgagcctgctgcaggccacgctacaccgctatgagcatgccctctctcagtgcagtgtggatgtgtataagaaagtgggcagcctgtaccctgagatgagtgcccatgagcgctccttggatttcctcattgaactgctgcacaaggatcagctggatgagactgtcaatgtggagcctctcaccaaggccatcaagtactatcagcatctgtacagcatccaccttgccgaacagcctgaggactgtactatgcagctggctgaccacattaagttcacgcagagtgctctggactgcatgagtgtggaggtaggacggctgcgtgccttcttgcagggtgggcaggaggctacagatattgccctcctgctccgggatctggaaacttcatgcagtgacatccgccagttctgcaagaagatccgaaggcgaatgccagggacagatgctcctgggatcccagctgcactggcctttggaccacaggtatctgacacgctcctagactgcaggaaacacttgacgtgggtcgtggctgtgctgcaggaggtggcagctgctgctgcccagctcattgccccactggcagagaatgaggggctacttgtggctgctctggaggaactggctttcaaagcaagcgagcagatctatgggaccccctccagcagcccctatgagtgtctgcgccagtcatgcaacatcctcatcagtaccatgaacaagctggccacagccatgcaggagggggagtatgatgcagagcggccccccagcaagcctccaccggttgaactgcgggctgctgcccttcgtgcagagatcacagatgctgaaggcctgggtttgaagctcgaagatcgagagacagttattaaggagttgaagaagtcactcaagattaagggagaggagctaagtgaggccaatgtgcggctgagcctcctggagaagaagttggacagtgctgccaaggatgcagatgagcgcatcgagaaagtccagactcggctggaggagacccaggcactgctgcgaaagaaggagaaagagtttgaggagacaatggatgcactccaggctgacatcgaccagctggaggcagagaaggcagaactaaagcagcgtctgaacagccagtccaaacgcacgattgagggactccggggccctcctccttcaggcattgctactctggtctctggcattgctggtgaagaacagcagcgaggagccatccctgggcaggctccagggtctgtgccaggcccagggctggtgaaggactcaccactgctgcttcagcagatctctgccatgaggctgcacatctcccagctccagcatgagaacagcatcctcaagggagcccagatgaaggcatccttggcatccctgccccctctgcatgttgcaaagctatcccatgagggccctggcagtgagttaccagctggagcgctgtatcgtaagaccagccagctgctggagacattgaatcaattgagcacacacacgcacgtagtagacatcactcgcaccagccctgctgccaagagcccgtcggcccaacttatggagcaagtggctcagcttaagtccctgagtgacaccgtcgagaagctcaaggatgaggtcctcaaggagacagtatctcagcgccctggagccacagtacccactgactttgccaccttcccttcatcagccttcctcagggccaaggaggagcagcaggatgacacagtctacatgggcaaagtgaccttctcatgtgcggctggttttggacagcgacaccggctggtgctgacccaggagcagctgcaccagcttcacagtcgcctcatctcctaa

SEQ ID NO: 929 - DNA, 3573 bp, Homo Sapiens
atgaagacacgacagaataaagactcgatgtcaatgaggagtggacggaagaaagaggcccctgggccccgggaagaactgagatcgaggggccgggcctcccctggaggggtcagcacgtccagcagtgatggcaaagctgagaagtccaggcagacagccaagaaggcccgagtagaggaagcctccaccccaaaggtcaacaagcagggtcggagtgaggagatctcagagagtgaaagtgaggagaccaatgcaccaaaaaagaccaaaactgagcaggaactccctcggccacagtctccctccgatctggatagcttggacgggcggagccttaatgatgatggcagcagcgaccctagggatatcgaccaggacaaccgaagcacgtcccccagtatctacagccctggaagtgtggagaatgactctgactcatcttctggcctgtcccagggcccagcccgcccctaccacccacctccactctttcctccttcccctcaaccgccagacagcacccctcgacagccagaggctagctttgaaccccatccttctgtgacacccactggatatcatgctcccatggagccccccacatctcgaatgttccaggctcctcctggggcccctccccctcacccacagctctatcctgggggcactggtggagttttgtctggacccccaatgggtcccaaggggggaggggctgcctcatcagtggggggccctaatgggggtaagcagcaccccccacccactactcccatttcagtatcaagctctggggctagtggtgctcccccaacaaagccgcctaccactccagtgggtggtgggaacctaccttctgctccaccaccagccaacttcccccatgtgacaccgaacctgcctcccccacctgccctgagacccctcaacaatgcatcagcctctccccctggcctgggggcccaaccactacctggtcatctgccctctccccacgccatgggacagggtatgggtggacttcctcctggcccagagaagggcccaactctggctccttcaccccactctctgcctcctgcttcctcttctgctccagcgccccccatgaggtttccttattcatcctctagtagtagctctgcagcagcctcctcttccagttcttcctcctcttcctctgcctcccccttcccagcttcccaggcattgcccagctacccccactctttccctcccccaacaagcctctctgtctccaatcagccccccaagtatactcagccttctctcccatcccaggctgtgtggagccagggtcccccaccacctcctccctatggccgcctcttagccaacagcaatgcccatccaggccccttccctccctctactggggcccagtccaccgcccacccaccagtctcaacacatcaccatcaccaccagcaacagcaacagcagcagcagcagcagcagcagcagcagcagcagcagcagcagcatcacggaaactctgggccccctcctcctggagcatttccccacccactggagggcggtagctcccaccacgcacacccttacgccatgtctccctccctggggtctctgaggccctacccaccagggccagcacacctgcccccacctcacagccaggtgtcctacagccaagcaggccccaatggccctccagtctcttcctcttccaactcttcctcttccacttctcaagggtcctacccatgttcacacccctccccttcccagggccctcaaggggcgccctaccctttcccaccggtgcctacggtcaccacctcttcggctaccctttccacggtcattgccaccgtggcttcctcgccagcaggctacaaaacggcctccccacctgggcccccaccgtacggaaagagagccccgtccccgggggcctacaagacagccaccccacccggatacaaacccgggtcgcctccctccttccgaacggggaccccaccgggctatcgaggaacctcgccacctgcaggcccagggaccttcaagccgggctcgcccaccgtgggacctgggcccctgccacctgcggggccctcaggcctgccatcgctgccaccaccacctgcggcccctgcctcagggccgcccctgagcgccacgcagatcaaacaggagccggctgaggagtatgagacccccgagagcccggtgcccccagcccgcagcccctcgccccctcccaaggtggtagatgtacccagccatgccagtcagtctgccaggttcaacaaacacctggatcgcggcttcaactcgtgcgcgcgcagcgacctgtacttcgtgccactggagggctccaagctggccaagaagcgggccgacctggtggagaaggtgcggcgcgaggccgagcagcgcgcgcgcgaagaaaaggagcgcgagcgcgagcgggaacgcgagaaagagcgcgagcgcgagaaggagcgcgagcttgaacgcagcgtgaagttggctcaggagggccgtgctccggtggaatgcccatctctgggcccagtgccccatcgccctccatttgaaccgggcagtgcggtggctacagtgcccccctacctgggtcctgacactccagccttgcgcactctcagtgaatatgcccggcctcatgtcatgtctcctggcaatcgcaaccatccattctacgtgcccctgggggcagtggacccggggctcctgggttacaatgtcccggccctgtacagcagtgatccagctgcccgggagagggaacgggaagcccgtgaacgagacctccgtgaccgcctcaagcctggctttgaggtgaagcctagtgagctggaacccctacatggggtccctgggccgggcttggatccctttccccgacatgggggcctggctctgcagcctggcccacctggcctgcaccctttcccctttcatccgagcctggggcccctggagcgagaacgtctagcgctggcagctgggccagccctgcggcctgacatgtcctatgctgagcggctggcagctgagaggcagcacgcagaaagggtggcggccctgggcaatgacccactggcccggctgcagatgctcaatgtgactccccatcaccaccagcactcccacatccactcgcacctgcacctgcaccagcaagatgctatccatgcagcctctgcctcggtgcaccctctcattgaccccctggcctcagggtctcaccttacccggatcccctacccagctggaactctccctaaccccctgcttcctcaccctctgcacgagaacgaagttcttcgtcaccagctctttgctgccccttaccgggacctgccggcctccctttctgccccgatgtcagcagctcatcagctgcaggccatgcacgcacagtcagctgagctgcagcgcttggcgctggaacagcagcagtggctgcatgcccatcacccgctgcacagtgtgccgctgcctgcccaggaggactactacagtcacctgaagaaggaaagcgacaagccactgtag

SEQ ID NO: 930 - DNA, 654 bp, Homo Sapiens
atggaagccatcgccaaatatgacttcaaagctactgcagacgacgagctgagcttcaaaaggggggacatcctcaaggttttgaacgaagaatgtgatcagaactggtacaaggcagagcttaatggaaaagacggcttcattcccaagaactacatagaaatgaaaccacatccgtggttttttggcaaaatccccagagccaaggcagaagaaatgcttagcaaacagcggcacgatggggcctttcttatccgagagagtgagagcgctcctggggacttctccctctctgtcaagtttggaaacgatgtgcagcacttcaaggtgctccgagatggagccgggaagtacttcctctgggtggtgaagttcaattctttgaatgagctggtggattatcacagatctacatctgtctccagaaaccagcagatattcctgcgggacatagaacaggtgccacagcagccgacatacgtccaggccctctttgactttgatccccaggaggatggagagctgggcttccgccggggagattttatccatgtcatggataactcagaccccaactggtggaaaggagcttgccacgggcagaccggcatgtttccccgcaattatgtcacccccgtgaaccggaacgtctaa

SEQ ID NO: 931 - DNA, 1914 bp, Homo Sapiens
atggatccgggcagtggcggcggcggcggcggcggcggcggcggcgggagcagcagcggcagcagcagcagcgactcggcgcctgactgctgggaccaggcggacatggaagcccccgggccgggcccttgcggcggcggcggctccctggcggcggcggccgaggcccagcgggagaacctcagcgcggccttcagccggcaactcaacgtcaacgccaagcccttcgtgcccaacgtccacgccgccgagttcgtgccgtccttcctgcggggcccggcagcgccgccacccccagctggcggcgccgccaataaccacggagccggcagcggcgcgggaggccgtgcggcacctgtggaatcctctcaagaggaacagtcattgtgtgaaggttcaaattcagctgttagcatggaactttcagaacctattgtagaaaatggagagacagaaatgtctccagaagaatcatgggagcacaaagaagaaataagtgaagcagagccagggggtggttccttgggagatggaaggccgccagaggaaagtgcccatgaaatgatggaggaggaagaggaaatcccaaaacctaagtctgtggttgcaccgccaggtgctcctaagaaagagcatgtaaatgtagtattcattgggcacgtagatgctggcaagtcaaccattggaggacaaataatgtatttgactggaatggttgacaaaaggacgcttgaaaagtatgaaagagaagctaaagagaaaaacagagaaacttggtacttgtcttgggccttagacacaaatcaggaagaacgagacaagggtaaaacagtagaagtgggtcgtgcctattttgaaaccgaaaagaagcatttcacaattctagatgcccctggccacaagagttttgtcccaaatatgattggtggtgcctctcaagctgatttggctgtgctggtaatctcagccaggaaaggagagtttgaaactggatttgaaaaaggaggacagacaagagaacatgcaatgttggcaaagacagcaggtgtaaaacacctaattgtgctaattaataagatggatgatccaacagtaaattggagcaatgagagatatgaagaatgtaaggagaaactagtgccatttttgaaaaaagttggcttcaatcccaaaaaggacattcactttatgccctgctcaggacttactggagcaaatctcaaagagcagtcggatttctgtccttggtacattggattaccgtttattccatatctggataatttgccgaacttcaatagatcagttgatggaccaatcaggctgccaattgtggataagtacaaggatatgggcactgtggtcctgggaaagctggaatcaggatctatttgtaaaggccagcagcttgtgatgatgccaaacaagcacaacgtggaagttcttggaatactttccgatgatgtagagactgataccgtagccccaggtgaaaacctcaaaatcagactgaaaggaattgaagaagaggagattcttccagggtttatactttgtgatcctaataatctttgtcattctggacgcacatttgatgcccagatagtgattatagagcacaaatccatcatctgcccaggctataatgcggtgctgcatattcatacctgtattgaggaggtggaaataacagccttaatctgcttggtagacaaaaaatcaggagaaaaaagtaagacccgaccccgttttgtcaaacaagatcaagtatgcattgctcgcttaaggacagcaggaaccatctgccttgagacctttaaagacttccctcagatgggtcgtttcaccttaagagatgagggtaagaccattgcaattggaaaagttctgaaactggttccagagaaagactaa

SEQ ID NO: 932 - DNA, 1722 bp, Homo Sapiens
atgcttcggttacccacagtctttcgccagatgagaccggtgtccagggtactggctcctcatctcactcgggcttatgccaaagatgtaaaatttggtgcagatgcccgagccttaatgcttcaaggtgtagaccttttagccgatgctgtggccgttacaatggggccaaagggaagaacagtgattattgagcagagttggggaagtcccaaagtaacaaaagatggtgtgactgttgcaaagtcaattgacttaaaagataaatacaaaaacattggagctaaacttgttcaagatgttgccaataacacaaatgaagaagctggggatggcactaccactgctactgtactggcacgctctatagccaaggaaggcttcgagaagattagcaaaggtgctaatccagtggaaatcaggagaggtgtgatgttagctgttgatgctgtaattgctgaacttaaaaagcagtctaaacctgtgaccacccctgaagaaattgcacaggttgctacgatttctgcaaacggagacaaagaaattggcaatatcatctctgatgcaatgaaaaaagttggaagaaagggtgtcatcacagtaaaggatggaaaaacactgaatgatgaattagaaattattgaaggcatgaagtttgatcgaggctatatttctccatactttattaatacatcaaaaggtcagaaatgtgaattccaggatgcctatgttctgttgagtgaaaagaaaatttctagtatccagtccattgtacctgctcttgaaattgccaatgctcaccgtaagcctttggtcataatcgctgaagatgttgatggagaagctctaagtacactcgtcttgaataggctaaaggttggtcttcaggttgtggcagtcaaggctccagggtttggtgacaatagaaagaaccagcttaaagatatggctattgctactggtggtgcagtgtttggagaagagggattgaccctgaatcttgaagacgttcagcctcatgacttaggaaaagttggagaggtcattgtgaccaaagacgatgccatgctcttaaaaggaaaaggtgacaaggctcaaattgaaaaacgtattcaagaaatcattgagcagttagatgtcacaactagtgaatatgaaaaggaaaaactgaatgaacggcttgcaaaactttcagatggagtggctgtgctgaaggttggtgggacaagtgatgttgaagtgaatgaaaagaaagacagagttacagatgcccttaatgctacaagagctgctgttgaagaaggcattgttttgggagggggttgtgccctccttcgatgcattccagccttggactcattgactccagctaatgaagatcaaaaaattggtatagaaattattaaaagaacactcaaaattccagcaatgaccattgctaagaatgcaggtgttgaaggatctttgatagttgagaaaattatgcaaagttcctcagaagttggttatgatgctatggctggagattttgtgaatatggtggaaaaaggaatcattgacccaacaaaggttgtgagaactgctttattggatgctgctggtgtggcctctctgttaactacagcagaagttgtagtcacagaaattcctaaagaagagaaggaccctggaatgggtgcaatgggtggaatgggaggtggtatgggaggtggcatgttctaa

SEQ ID NO: 933 - DNA, 417 bp, Homo Sapiens
atgaactcactggtttcttggcagctactgcttttcctctgtgccacccactttggggagccattagaaaaggtggcctctgtggggaattctagacccacaggccagcagctagaatccctgggcctcctggcccccggggagcagagcctgccgtgcaccgagaggaagccagctgctactgccaggctgagccgtcgggggacctcgctgtccccgccccccgagagctccgggagcccccagcagccgggcctgtccgccccccacagccgccagatccccgcaccccagggcgcggtgctggtgcagcgggagaaggacctgccgaactacaactggaactccttcggcctgcgcttcggcaagcgggaggcggcaccagggaaccacggcagaagcgctgggcggggctga

SEQ ID NO: 934 - DNA, 7407 bp, Homo Sapiens
atggcgaccgtggtggtggaagccaccgagccggagccgtccggcagcatcgccaacccggcggcgtccacctcgcctagcctgtcgcaccgcttccttgacagcaagttctacttgctggtggtcgtcggcgagatcgtgaccgaggagcacctgcggcgtgccatcggcaacatcgagctcggaatccgatcatgggacacaaacctgattgaatgcaacttggaccaagaactcaaactttttgtatctcgacactctgcaagattctctcctgaagtcccaggacaaaagatccttcatcaccgaagtgacgttttagaaacagtggtcctgatcaacccttctgatgaagcagtcagcaccgaggtgcgcttaatgatcactgatgctgcccgacacaagctgctcgtgctgaccgggcagtgctttgaaaataccggagagctcattctccagtccggctctttctccttccagaacttcatagagattttcaccgatcaagagatcggggagttactaagcaccacccatcctgccaacaaagccagcttaaccctgttctgtcctgaagaaggggactggaagaactccaatcttgacagacacaatctccaagacttcatcaatattaaactcaattcagcttctatcttgccagaaatggaaggactttctgagtttaccgagtatctctcagaatcagtggaagtcccatctccctttgacatcttggaacctcccacatcgggtggatttctgaagctctccaagccctgctgttatatttttccaggagggaggggcgattctgccttgtttgcagtgaatggtttcaatatgctcatcaatggcggatcagagagaaaatcctgcttctggaagctcatccgacacttagaccgagtggactccatcctgctcacccacattggggatgacaatttgcctggaataaacagcatgttacagcggaaaattgcagagctcgaggaagaacagtcccagggctccaccacaaatagtgactggatgaaaaacctcatctcccctgacttaggagttgtatttctcaatgtacctgaaaatctcaaaaatccagagccaaacatcaagatgaagagaagcatagaagaagcctgcttcactctccagtacctaaacaaattgtccatgaaaccagaacctctgtttagaagtgtaggcaatactattgatcctgtcattcttttccaaaaaatgggagtaggtaaacttgagatgtatgtgcttaatccagtcaagagcagcaaggaaatgcagtattttatgcagcagtggactggtaccaacaaagacaaggctgaattcattctgcctaatggtcaagaagtagatctcccgatttcctacttaacttcagtctcatctttgattgtgtggcatccagcaaaccctgcggagaaaatcatccgagtcctgtttcctgggaacagcacccagtacaacatcctggaagggttggaaaagctcaaacatctagactttctgaagcagccactggccacccaaaaggatctcactggccaggtgcccactcctgtggtgaaacaaacaaaactgaaacagagggctgatagccgagaaagtctgaagccagccgcaaaaccacttcctagcaaatccgtgcgcaaggagtcaaaagaagaaacccctgaggtcacaaaagtgaatcacgtggaaaagccacccaaagttgaaagcaaagaaaaggtaatggtgaaaaaagacaagccaataaaaacagagaccaaaccttcagtgactgaaaaggaggttcccagcaaagaagagccatctccagtgaaagccgaggtggctgagaagcaagccacagatgtcaaacccaaagctgccaaggagaagacggtgaaaaaggaaacaaaggtaaagcctgaagacaagaaagaggagaaagaaaagccaaagaaagaagtggctaaaaaggaggacaaaacacctatcaagaaggaggaaaaaccaaaaaaggaagaggtgaaaaaagaagtcaaaaaagagatcaagaaagaagagaaaaaagaacccaagaaagaggttaagaaagaaacaccgccaaaggaagtcaagaaggaagttaagaaggaagagaagaaggaagtgaaaaaggaagaaaaggaacccaaaaaagaaattaagaagctccctaaagacgcaaagaaatcatctactcctctgtctgaagcaaaaaaaccagctgctttaaaaccaaaagtacccaagaaggaagagtctgtcaagaaagattctgttgctgccggaaagccaaaggagaaggggaaaataaaagtcattaagaaggaaggcaaggccgcagaggctgtcgctgcagctgtcggcactggagccaccacagcagctgtcatggcggcagctggaatagcagccattggccctgccaaagaactcgaagctgagaggtcccttatgtcatctcctgaggatctaaccaaggactttgaagagttaaaggctgaagaggtcgatgtaacaaaggacatcaagcctcagctggagctaatcgaagacgaagagaaactgaaggaaactgagccagtcgaagcctacgtcatccagaaggagagagaagtcaccaaaggtcctgccgagtcccctgatgagggaatcactaccactgaaggggagggcgaatgtgaacagacacctgaggagctggagcccgtcgagaagcagggagtagacgacattgaaaaatttgaagatgaaggagccggttttgaagaatcttcagagactggagactatgaagagaaggcagaaactgaggaggctgaggagccagaagaggatggggaggaacacgtatgtgtgagcgcctccaagcacagccccactgaggatgaggaaagtgccaaggcggaggctgatgcatacatcagggagaagagggagtctgtggccagtggggatgaccgagccgaagaagacatggatgaggccattgagaaaggagaggctgaacaatctgaagaggaggctgatgaggaggacaaagctgaagatgccagagaggaggaatatgagccggaaaaaatggaagctgaagactatgtgatggctgtggtcgacaaggctgcagaggctggtggtgccgaggagcagtatggattcctcaccacaccaaccaagcaactaggagcccagtctcctggccgagaacctgcatcttcaattcatgatgagactttacctggaggctcagagagcgaggccaccgcttctgatgaggagaatcgagaagaccagcctgaggaattcactgccacctctggctacactcagtctactattgagatatccagtgagcccacccccatggatgagatgtctacccctcgagacgtgatgagtgatgagaccaacaatgaagagacggagtccccttctcaggaattcgtaaatatcaccaaatatgaatcttcattgtattctcaggaatactctaaacctgctgatgttacaccgctcaacggattttctgaaggatcaaaaacagatgccactgatggcaaggattacaatgcttcagcctctaccatatcaccaccctcttccatggaggaagacaaattcagcagatctgctttacgtgatgcttactgctctgaagtgaaagccagcaccactttggacatcaaagatagcatctcagctgtttcaagtgaaaaggtcagcccatcgaagagcccgtccctgagtccatctccaccatcacccttagaaaagacccccctgggtgaacgtagtgtgaacttctctctgacgcccaatgagattaaagtctctgcagaggcagaagtagccccggtgtctcctgaggtgacccaagaagtagttgaagaacattgtgctagtcctgaggacaagactctggaagtggtgtcaccatctcagtccgtgactggcagtgctggtcacacaccttactatcaatctcctactgacgagaaatccagtcatctccctacagaagtcattgaaaaaccaccagcagttccagtgagttttgaattcagtgatgccaaagatgagaatgaaagggcttcagtaagccccatggatgagcccgtgcctgactcagagtctcctattgaaaaagttttgtctcctttacgcagcccgcccctcattggatccgagtctgcttatgaaagttttctaagtgctgatgacaaggcttctggcagaggtgccgaaagtccttttgaagaaaagagtggaaaacaaggctctccagaccaagtaagtccagtttctgaaatgacttctactagtctttaccaagacaaacaggaagggaaaagcacagactttgcaccaataaaagaagactttggccaagaaaagaaaactgatgatgttgaagccatgagttctcaaccagcactggctctggatgaaaggaaattaggagatgtttctcccacacaaatagatgtcagtcagtttggatcttttaaagaagacactaagatgtccatttctgaaggtactgtctcagacaagtcagctactcctgttgatgagggcgtagcagaagacacgtactctcatatggagggtgtggcctcagtgtccacagcctcagtggctacgagctcatttccagagccaacaacagatgatgtgtctccatctctgcatgctgaggttggctccccacattccacagaagtagatgactccctttcagtgtctgttgtgcaaacacctaccacattccaggaaacagaaatgtctccatctaaagaagaatgcccaagaccgatgtcaatttctccaccagatttctcccctaaaactgcaaagtccaggacacccgttcaagatcacagatctgaacagtcctcaatgtctattgaatttggccaagaatctcctgagcaatcccttgctatggacttcagtcgacagtctccagatcaccctacagtgggtgcaggcgtgcttcacatcactgaaaatgggccaactgaagtggactacagtccttctgacatgcaggactccagtttatcacataagataccacctatggaggagccgtcctacacccaagataatgatctttctgagctcatctcagtatctcaggtagaggcctccccgtccacctcttctgctcataccccttctcagatcgcttctcctctccaagaagatactctatccgatgttgctcctcccagagatatgtccttatatgcctcactcacctctgaaaaagtgcaaagtctggaaggagagaagctctctccaaaatctgatatctctccactcaccccacgagagtcctctcctttatattcacctactttttcagattctacctctgcagtcaaagagaaaacagcaacttgccacagttcctcttctccaccaatagatgcagcatccgcagagccctatggcttccgtgcctcagtgttattcgatacaatgcaacaccatctagccttgaatagagatttgtccacacctggcctggagaaggacagtggagggaagacacctggtgactttagctatgcctatcaaaagcctgaggaaacaaccaggtccccagatgaagaagattatgactatgagtcttatgagaagaccacccggacctcagatgtgggtggctattactatgagaagatagagagaaccacaaaatctccaagtgacagtggctactcctatgagaccattgggaaaactaccaagacccctgaagatggtgactattcctatgaaattattgagaagaccacacggacccctgaagagggtgggtactcatatgacataagtgaaaagaccaccagcccccccgaagtgagtggttacagctatgaaaagactgagaggtctagaaggcttctggatgacatcagcaatggctatgatgactctgaggatggtggccacacacttggggaccccagctactcttatgaaaccactgagaaaattaccagtttccctgagtctgaaggttattcctatgagacatctacaaagacaacacgaacccctgatacttccacatactgttacgagactgcagagaaaatcactagaacccctcaggcatccacatattcctacgagacttcagacctatgctacactgcagaaaagaagtccccctcagaagcccgtcaggatgtcgatttatgcctcgtgtcctcttgtgaatacaagcaccccaagacagagctttcaccctctttcattaatcccaatcctcttgagtggtttgccagtgaagaacccactgaagaatctgaaaagcccctcactcaatcagggggagccccaccgcctccaggaggaaagcaacagggccgacagtgtgatgaaacccctcccacctcagtcagcgagtcagccccatcccagaccgactctgatgttcccccggagactgaagagtgcccctccatcacggccgatgccaatatcgactctgaagacgagtcggaaaccatccccacagacaaaactgtcacgtacaaacacatggacccacctccagctcccgtgcaagaccgcagcccttcgccacgccaccctgatgtgtccatggtggacccagaggccttggccattgagcagaacctgggcaaagctctaaagaaagatctgaaagagaagaccaaaaccaaaaagccaggtacaaagaccaagtcatcttcacctgtcaaaaagagtgatgggaagtctaagcccttggcagcttcaccaaaaccagcgggcttgaaagaatcctcggataaagtgtccagggtggcttctcctaagaagaaagaatctgtggaaaaggcagcaaaacccaccaccactcctgaggtcaaagctgcacgtggggaagagaaagacaaggagaccaagaatgctgccaatgcctctgcatccaagtcggccaagaccgccactgcaggaccaggaactaccaagacgaccaagtcatctgctgtgcccccaggcctccctgtgtatttggacctgtgctacattcctaaccacagcaatagtaagaatgttgatgtggaatttttcaagagagtgcggtcttcctactacgtggtgagtgggaatgaccctgctgctgaggagcccagccgggctgtcctggacgctttgttggaaggaaaggctcagtggggcagcaacatgcaggtgacactgatcccaactcatgactcagaagtgatgagggaatggtaccaggagacccatgagaaacagcaagatctcaacatcatggttttagcaagcagcagcacagtggttatgcaagatgaatccttccctgcatgcaagattgaactgtaa

SEQ ID NO: 935 - DNA, 1059 bp, Homo Sapiens
atggctgagccccgccaggagttcgaagtgatggaagatcacgctgggacgtacgggttgggggacaggaaagatcaggggggctacaccatgcaccaagaccaagagggtgacacggacgctggcctgaaagctgaagaagcaggcattggagacacccccagcctggaagacgaagctgctggtcacgtgacccaagctcgcatggtcagtaaaagcaaagacgggactggaagcgatgacaaaaaagccaagggggctgatggtaaaacgaagatcgccacaccgcggggagcagcccctccaggccagaagggccaggccaacgccaccaggattccagcaaaaaccccgcccgctccaaagacaccacccagctctggtgaacctccaaaatcaggggatcgcagcggctacagcagccccggctccccaggcactcccggcagccgctcccgcaccccgtcccttccaaccccacccacccgggagcccaagaaggtggcagtggtccgtactccacccaagtcgccgtcttccgccaagagccgcctgcagacagcccccgtgcccatgccagacctgaagaatgtcaagtccaagatcggctccactgagaacctgaagcaccagccgggaggcgggaaggtgcaaatagtctacaaaccagttgacctgagcaaggtgacctccaagtgtggctcattaggcaacatccatcataaaccaggaggtggccaggtggaagtaaaatctgagaagcttgacttcaaggacagagtccagtcgaagattgggtccctggacaatatcacccacgtccctggcggaggaaataaaaagattgaaacccacaagctgaccttccgcgagaacgccaaagccaagacagaccacggggcggagatcgtgtacaagtcgccagtggtgtctggggacacgtctccacggcatctcagcaatgtctcctccaccggcagcatcgacatggtagactcgccccagctcgccacgctagctgacgaggtgtctgcctccctggccaagcagggtttgtga

SEQ ID NO: 936 - DNA, 2703 bp, Homo Sapiens
atgagactgttcgtgagtgatggcgtcccgggttgcttgccggtgctggccgccgccgggagagcccggggcagagcagaggtgctcatcagcactgtaggcccggaagattgtgtggtcccgttcctgacccggcctaaggtccctgtcttgcagctggatagcggcaactacctcttctccactagtgcaatctgccgatatttttttttgttatctggctgggagcaagatgacctcactaaccagtggctggaatgggaagcgacagagctgcagccagctttgtctgctgccctgtactatttagtggtccaaggcaagaagggggaagatgttcttggttcagtgcggagagccctgactcacattgaccacagcttgagtcgtcagaactgtcctttcctggctggggagacagaatctctagccgacattgttttgtggggagccctatacccattactgcaagatcccgcctacctccctgaggagctgagtgccctgcacagctggttccagacactgagtacccaggaaccatgtcagcgagctgcagagactgtactgaaacagcaaggtgtcctggctctccggccttacctccaaaagcagccccagcccagccccgctgagggaagggctgtcaccaatgagcctgaggaggaggagctggctaccctatctgaggaggagattgctatggctgttactgcttgggagaagggcctagaaagtttgcccccgctgcggccccagcagaatccagtgttgcctgtggctggagaaaggaatgtgctcatcaccagtgccctcccttacgtcaacaatgtcccccaccttgggaacatcattggttgtgtgctcagtgccgatgtctttgccaggtactctcgcctccgccagtggaacaccctctatctgtgtgggacagatgagtatggtacagcaacagagaccaaggctctggaggagggactaaccccccaggagatctgcgacaagtaccacatcatccatgctgacatctaccgctggtttaacatttcgtttgatatttttggtcgcaccaccactccacagcagaccaaaatcacccaggacattttccagcagttgctgaaacgaggttttgtgctgcaagatactgtggagcaactgcgatgtgagcactgtgctcgcttcctggctgaccgcttcgtggagggcgtgtgtcccttctgtggctatgaggaggctcggggtgaccagtgtgacaagtgtggcaagctcatcaatgctgtcgagcttaagaagcctcagtgtaaagtctgccgatcatgccctgtggtgcagtcgagccagcacctgtttctggacctgcctaagctggagaagcgactggaggagtggttggggaggacattgcctggcagtgactggacacccaatgcccagtttatcacccgttcttggcttcgggatggcctcaagccacgctgcataacccgagacctcaaatggggaacccctgtacccttagaaggttttgaagacaaggtattctatgtctggtttgatgccactattggctatctgtccatcacagccaactacacagaccagtgggagagatggtggaagaacccagagcaagtggacctgtatcagttcatggccaaagacaatgttcctttccatagcttagtctttccttgctcagccctaggagctgaggataactataccttggtcagccacctcattgctacagagtacctgaactatgaggatgggaaattctctaagagccgcggtgtgggagtgtttggggacatggcccaggacacggggatccctgctgacatctggcgcttctatctgctgtacattcggcctgagggccaggacagtgctttctcctggacggacctgctgctgaagaataattctgagctgcttaacaacctgggcaacttcatcaacagagctgggatgtttgtgtctaagttctttgggggctatgtgcctgagatggtgctcacccctgatgatcagcgcctgctggcccatgtcaccctggagctccagcactatcaccagctacttgagaaggttcggatccgggatgccttgcgcagtatcctcaccatatctcgacatggcaaccaatatattcaggtgaatgagccctggaagcggattaaaggcagtgaggctgacaggcaacgggcaggaacagtgactggcttggcagtgaatatagctgccttgctctctgtcatgcttcagccttacatgcccacggttagtgccacaatccaggcccagctgcagctcccacctccagcctgcagtatcctgctgacaaacttcctgtgtaccttaccagcaggacaccagattggcacagtcagtcccttgttccaaaaattggaaaatgaccagattgaaagtttaaggcagcgctttggagggggccaggcaaaaacgtccccgaagccagcagttgtagagactgttacaacagccaagccacagcagatacaagcgctgatggatgaagtgacaaaacaaggaaacattgtccgagaactgaaagcacaaaaggcagacaagaacgaggttgctgcggaggtggcgaaactcttggatctaaagaaacagttggctgtagctgaggggaaaccccctgaagcccctaaaggcaagaagaaaaagtaa

SEQ ID NO: 937 - DNA, 1332 bp, Homo Sapiens
atggaggaggacattgatacccgcaaaatcaacaacagtttcctgcgcgaccacagctatgcgaccgaagctgacattatctctacggtagaattcaaccacacgggagaattactagcgacaggggacaaggggggtcgggttgtaatatttcaacgagagcaggagagtaaaaatcaggttcatcgtaggggtgaatacaatgtttacagcacattccagagccatgaacccgagttcgattacctgaagagtttagaaatagaagaaaaaatcaataaaataagatggctcccccagcagaatgcagcttactttcttctgtctactaatgataaaactgtgaagctgtggaaagtcagcgagcgtgataagaggccagaaggctacaatctgaaagatgaggagggccggctccgggatcctgccaccatcacaaccctgcgggtgcctgtcctgagacccatggacctgatggtggaggccaccccacgaagagtatttgccaacgcacacacatatcacatcaactccatatctgtcaacagcgactatgaaacctacatgtccgctgatgacctgaggattaacctatggaactttgaaataaccaatcaaagttttaatattgtggacattaagccagccaacatggaggagctcacggaggtgatcacagcagccgagttccacccccatcattgcaacaccttcgtgtacagcagcagcaaagggacaatccggctgtgtgacatgcgggcatctgccctgtgtgacaggcacaccaaattttttgaagagccggaagatccaagcaacagatcatttttctctgaaattatctcttcgatttcggatgtgaagttcagccacagtgggaggtatatcatgaccagggactacttgaccgtcaaagtctgggatctcaacatggaaaaccgccccatcgagacttaccaggttcatgactacctccgcagcaagctgtgttccctctatgaaaatgactgcatttttgataaatttgagtgtgtgtggaatgggtcagacagtgtcatcatgacaggctcctacaacaacttcttcaggatgttcgacagaaacaccaagcgtgatgtgacccttgaggcttcgagggaaaacagcaagccccgggctatcctcaaaccccgaaaagtgtgtgtggggggcaagcggagaaaagacgagatcagtgtcgacagtctggactttagcaaaaagatcttgcatacagcttggcatccttcagaaaatattatagcagtggcggctacaaataacctatatatattccaggacaaggttaactag

SEQ ID NO: 938 - DNA, 795 bp, Homo Sapiens
atggaagcgtttttggggtcgcggtccggactttgggcggggggtccggccccaggacagttttaccgcattccgtccactcccgattccttcatggatccggcgtctgcactttacagaggtccaatcacgcggacccagaaccccatggtgaccgggacctcagtcctcggcgttaagttcgagggcggagtggtgattgccgcagacatgctgggatcctacggctccttggctcgtttccgcaacatctctcgcattatgcgagtcaacaacagtaccatgctgggtgcctctggcgactacgctgatttccagtatttgaagcaagttctcggccagatggtgattgatgaggagcttctgggagatggacacagctatagtcctagagctattcattcatggctgaccagggccatgtacagccggcgctcgaagatgaaccctttgtggaacaccatggtcatcggaggctatgctgatggagagagcttcctcggttatgtggacatgcttggtgtagcctatgaagccccttcgctggccactggttatggtgcatacttggctcagcctctgctgcgagaagttctggagaagcagccagtgctaagccagaccgaggcccgcgacttagtagaacgctgcatgcgagtgctgtactaccgagatgcccgttcttacaaccggtttcaaatcgccactgtcaccgaaaaaggtgttgaaatagagggaccattgtctacagagaccaactgggatattgcccacatgatcagtggctttgaatga

SEQ ID NO: 939 - DNA, 2760 bp, Homo Sapiens
atgaagttcgcttaccggttttcaaatttgctgggtacggtgtaccggcgtgggaacctaaattttacctgcgatggaaattcagttatcagtcccgtgggcaatagagtcactgtatttgaccttaaaaacaacaaatctgacacgctgcccctggccactcggtacaacgtcaagtgcgtggggctgtccccggatggccgcctcgctatcatcgtcgatgaagggggcgatgcgctgctggtcagcctggtctgcaggtctgtgctgcaccacttccacttcaagggctctgtgcacagtgtgtccttctcccctgatggcaggaagtttgttgtcacaaagggtaacattgcccagatgtatcatgcccctgggaagaagcgggagttcaacgccttcgttctggacaagacctattttgggccctacgatgagaccacctgcatcgactggacggatgactccaggtgctttgtggttgggagcaaagacatgtccacctgggtgttcggagccgagcgctgggacaacctcatctactatgcactggggggacataaggatgccatcgtggcctgcttctttgaatccaacagcctggacctgtactcactcagccaggacggagtgctgtgcatgtggcagtgtgacacgccccccgagggcttgcggctgaagccccctgcgggctggaaagcagacctgttgcagcgggaggaggaagaggaggaggaggaggaccaggagggcgacagagagaccaccatccggggaaaagccactccggccgaggaggagaagacaggaaaagtgaagtactcacggctggccaagtacttcttcaataaagaaggggattttaacaacctgacagctgcagcatttcataagaagtctcacctcttggtcactggctttgcttctggaatcttccatcttcatgagctgccagagtttaacctcatccactccctgagcatttcagatcagagcatcgcctcagtggccatcaatagctcgggggactggattgcttttggctgttcaggcctgggccagctgctggtgtgggagtggcagagtgagtcctacgtgctcaagcagcagggccacttcaacagcatggtggccctggcctactcgcccgacggacagtacatcgtgactggcggggacgacggcaaggtcaaggtgtggaacaccctcagcggcttctgcttcgtcacttttacggagcactccagcggggtgaccggtgtgacctttactgccaccggctacgttgtggtgacctcatccatggacgggaccgtgcgagcctttgaccttcacaggtaccgaaacttccgcaccttcacctctccacgccccacccagttctcctgtgtggcggtggatgcgagcggtgagatcgtctctgcaggggcgcaggactcctttgagattttcgtgtggtccatgcagacaggcaggctccttgatgttttgtctggacacgaagggcccatcagtggtctgtgttttaacccaatgaagtccgtcctggccagtgcctcctgggacaagacagtgcgcctatgggacatgtttgacagctggaggaccaaggagacgctggccctgacctctgatgctctggctgtgacttttcgccctgatggtgcggagctggctgtggccacactgaactcacagatcaccttctgggaccctgagaacgcggtgcagacgggctccattgagggcaggcatgacctcaagactggcaggaaggagctggacaagattacagccaagcacgcggccaaggggaaggccttcaccgccctgtgctactctgcagacggccacagcatcctggcgggaggcatgtccaagttcgtgtgcatctaccacgtccgtgagcagattctcatgaagaggttcgagatctcttgcaacctgtctttggacgccatggaggaatttttgaaccgaagaaaaatgacagagtttggcaacctggcactaattgatcaggatgctgggcaggaggatggagtcgcgataccactgccaggcgtcaggaaaggtgacatgagttctcggcacttcaaacctgagatcagggtgacctcactccgcttctctcccactgggcgctgctgggcggccaccaccacggagggactcctcatctactccctggacacccgcgtgctctttgacccgtttgagctggacaccagcgtcacccccgggagggtgcgcgaggcactgcgccagcaggacttcaccagggccatcctcatggccctccggctcaacgagagcaaactggtgcaggaggccctggaggcggtgcccaggggcgagattgaagtggtcacctcctcccttcctgaactgtatgtggagaaagtgctggagtttttagcttcctcctttgaagtgtctcgccacctggaattctacctcctctggactcacaaactgctcatgttgcacggacagaagctgaagtccagagccgggacgctgctgcctgtcattcagttcctccagaagagcatccagcggcacctggacgacctgtcgaaactctgtagctggaaccactataacatgcagtacgcactagcagtttccaagcagcggggcacaaaacgctccctagacccgctgggaagtgaggaggaggcagaagcatctgaagatgacagcctgcatctgcttggaggaggaggcagagactcagaagaagagatgctggcctag

SEQ ID NO: 940 - DNA, 585 bp, Homo Sapiens
atgccagtggcccggagctgggtttgtcgcaaaacttatgtgaccccgcggagacccttcgagaaatctcgtctcgaccaagagctgaagctgatcggcgagtatgggctccggaacaaacgtgaggtctggagggtcaaatttaccctggccaagatccgcaaggccgcccgggaactgctgacgcttgatgagaaggacccacggcgtctgttcgaaggcaacgccctgctgcggcggctggtccgcattggggtgctggatgagggcaagatgaagctggattacatcctgggcctgaagatagaggatttcttagagagacgcctgcagacccaggtcttcaagctgggcttggccaagtccatccaccacgctcgcgtgctgatccgccagcgccatatcagggtccgcaagcaggtggtgaacatcccgtccttcattgtccgcctggattcccagaagcacatcgacttctctctgcgctctccctacgggggtggccgcccgggccgcgtgaagaggaagaatgccaagaagggccagggtggggctggggctggagacgacgaggaggaggattaa

SEQ ID NO: 941 - DNA, 978 bp, Homo Sapiens
atgtcgctgctgcggtcgctgcgcgtgtttctggtcgcgcggaccgggagctacccggctgggtctcttctgcgtcagtcgccccagccaaggcacacattttatgctgggccccgtctgtctgcctcggcctccagcaaggagctcctcatgaagctgcggcggaaaacaggctactcctttgtaaattgcaagaaagctctggagacttgtggcggggacctcaaacaggcagagatctggctccacaaggaggcccagaaggagggctggagcaaagctgccaagctccaagggaggaagaccaaagaaggcctgattgggctgttgcaggaaggaaacacaactgtattagtagaggtaaactgtgagacagattttgtttctagaaatttaaaatttcaactgttggtccagcaagtagcccttggaaccatgatgcattgtcagaccctaaaggatcaaccctctgcatacagtaaaggtttcttgaattcctctgagctttctggacttccagctgggcctgacagagaaggctcactcaaggatcagttggctttagcaattggaaaactgggagaaaacatgattcttaaacgagctgcatgggtgaaggtgccatctgggttctacgttggctcttatgtccacggagcaatgcagagtccctcacttcacaagctggtgctggggaagtatggggccctggtcatctgtgagacgtctgaacagaaaacaaaccttgaagacgttggccgccgccttgggcagcatgtggtgggcatggcccccctctctgttggctccctggacgatgagcctgggggagaggcagagactaagatgctgtcccagccgtatttgctggatccctccattaccttggggcagtatgtgcagcctcagggggtgtcggtagtagactttgtgcggtttgaatgtggagaaggtgaagaggcagcagaaactgaatag

SEQ ID NO: 942 - DNA, 903 bp, Homo Sapiens
atgatcctgctggaggtgaacaaccgcatcatcgaggagacgctcgcgctcaagttcgagaacgcggccgccggaaacaaaccggaagcagtagaagtaacatttgcagatttcgatggggtcctctatcatatttcaaatcctaatggagacaaaacaaaagtgatggtcagtatttctttgaaattctacaaggaacttcaggcacatggtgctgatgagttattaaagagggtgtacgggagtttcttggtaaatccagaatcaggatacaatgtctctttgctatatgaccttgaaaatcttccggcatccaaggattccattgtgcatcaagctggcatgttgaagcgaaattgttttgcctctgtctttgaaaaatacttccaattccaagaagagggcaaggaaggagagaacagggcagttatccattatagggatgatgagaccatgtatgttgagtctaaaaaggacagagtcacagtagtcttcagcacagtgtttaaggatgacgacgatgtggtcattggaaaggtgttcatgcaggagttcaaagaaggacgcagagccagccacacagccccacaggtcctctttagccacagggaacctcctctggagctgaaagacacagacgccgctgtgggtgacaacattggctacattacctttgtgctgttccctcgtcacaccaatgccagtgctcgagacaacaccatcaacctgatccacacgttccgggactacctgcactaccacatcaagtgctctaaggcctatattcacacacgtatgcgggcgaaaacgtctgacttcctcaaggtgctgaaccgcgcacgcccagatgccgagaaaaaagaaatgaaaacaatcacggggaagacgttttcatcccgctaa

SEQ ID NO: 943 - DNA, 2508 bp, Homo Sapiens
atggcggcctccgcggcggcagcctcggcagcagcggcctcggccgcctctggcagcccgggcccgggcgagggctccgctggcggcgaaaagcgctccaccgccccttcggccgcagcctcggcctctgcctcagccgcggcgtcgtcgcccgcggggggcggcgccgaggcgctggagctgctggagcactgcggcgtgtgcagagagcgcctgcgacccgagagggagccccgcctgctgccctgtttgcactcggcctgtagtgcctgcttagggcccgcggcccccgccgccgccaacagctcgggggacggcggggcggcgggcgacggcaccgtggtggactgtcccgtgtgcaagcaacagtgcttctccaaagacatcgtggagaattatttcatgcgtgatagtggcagcaaggctgccaccgacgcccaggatgcgaaccagtgctgcactagctgtgaggataatgccccagccaccagctactgtgtggagtgctcggagcctctgtgtgagacctgtgtagaggcgcaccagcgggtgaagtacaccaaggaccatactgtgcgctctactgggccagccaagtctcgggatggtgaacgtactgtctattgcaacgtacacaagcatgaaccccttgtgctgttttgtgagagctgtgatactctcacctgccgagactgccagctcaatgcccacaaggaccaccagtaccagttcttagaggatgcagtgaggaaccagcgcaagctcctggcctcactggtgaagcgccttggggacaaacatgcaacattgcagaagagcaccaaggaggttcgcagctcaatccgccaggtgtctgacgtacagaagcgtgtgcaagtggatgtcaagatggccatcctgcagatcatgaaggagctgaataagcggggccgtgtgctggtcaatgatgcccagaaggtgactgaggggcagcaggagcgcctggagcggcagcactggaccatgaccaagatccagaagcaccaggagcacattctgcgctttgcctcttgggctctggagagtgacaacaacacagcccttttgctttctaagaagttgatctacttccagctgcaccgggccctcaagatgattgtggatcccgtggagccacatggcgagatgaagtttcagtgggacctcaatgcctggaccaagagtgccgaggcctttggcaagattgtggcagagcgtcctggcactaactcaacaggccctgcacccatggcccctccaagagccccagggcccctgagcaagcagggctctggcagcagccagcccatggaggtgcaggaaggctatggctttgggtcaggagatgatccctactcaagtgcagagccccatgtgtcaggtgtgaaacggtcccgctcaggtgagggcgaggtgagcggccttatgcgcaaggtgccacgagtgagccttgaacgcctggacctggacctcacagctgacagccagccacccgtcttcaaggtcttcccaggcagtaccactgaggactacaaccttattgttattgaacgtggcgctgccgctgcagctaccggccagccagggactgcgcctgcaggaacccctggtgccccacccctggctggcatggccattgtcaaggaggaggagacggaggctgccattggagcccctcctactgccactgagggccctgagaccaaacctgtgcttatggctcttgcggagggtcctggtgctgagggtccccgcctggcctcacctagtggcagcaccagctcagggctggaggtggtggctcctgagggtacctcagccccaggtggtggcccgggaaccctggatgacagtgccaccatttgccgtgtctgccagaagccaggcgatctggttatgtgcaaccagtgtgagttttgtttccacctggactgtcacctgccggccctgcaggatgtaccaggggaggagtggagctgctcactctgccatgtgctccctgacctgaaggaggaggatggcagcctcagcctggatggtgcagacagcactggcgtggtggccaagctctcaccagccaaccagcggaaatgtgagcgtgtactgctggccctattctgtcacgaaccctgccgccccctgcatcagctggctaccgactccaccttctccctggaccagcccggtggcaccctggatctgaccctgatccgtgcccgcctccaggagaagttgtcacctccctacagctccccacaggagtttgcccaggatgtgggccgcatgttcaagcaattcaacaagttaactgaggacaaggcagacgtgcagtccatcatcggcctgcagcgcttcttcgagacgcgcatgaacgaggccttcggtgacaccaagttctctgctgtgctggtggagcccccgccgatgagcctgcctggtgctggcctgagttcccaggagctgtctggtggccctggtgatggcccctga

SEQ ID NO: 944 - DNA, 1185 bp, Homo Sapiens
atgtctcgggagatgcaggatgtagacctcgctgaggtgaagcctttggtggagaaaggggagaccatcaccggcctcctgcaagagtttgatgtccaggagcaggacatcgagactttacatggctctgttcacgtcacgctgtgtgggactcccaagggaaaccggcctgtcatcctcacctaccatgacatcggcatgaaccacaaaacctgctacaaccccctcttcaactacgaggacatgcaggagatcacccagcactttgccgtctgccacgtggacgcccctggccagcaggacggcgcagcctccttccccgcagggtacatgtacccctccatggatcagctggctgaaatgcttcctggagtccttcaacagtttgggctgaaaagcattattggcatgggaacaggagcaggcgcctacatcctaactcgatttgctctaaacaaccctgagatggtggagggccttgtccttatcaacgtgaacccttgtgcggaaggctggatggactgggccgcctccaagatctcaggatggacccaagctctgccggacatggtggtgtcccacctttttgggaaggaagaaatgcagagtaacgtggaagtggtccacacctaccgccagcacattgtgaatgacatgaaccccggcaacctgcacctgttcatcaatgcctacaacagccggcgcgacctggagattgagcgaccaatgccgggaacccacacagtcaccctgcagtgccctgctctgttggtggttggggacagctcgcctgcagtggatgccgtggtggagtgcaactcaaaattggacccaacaaagaccactctcctcaagatggcggactgtggcggcctcccgcagatctcccagccggccaagctcgctgaggccttcaagtacttcgtgcagggcatgggatacatgccctcggctagcatgacccgcctgatgcggtcccgcacagcctctggttccagcgtcacttctctggatggcacccgcagccgctcccacaccagcgagggcacccgaagccgctcccacaccagcgagggcacccgcagccgctcgcacaccagcgagggggcccacctggacatcacccccaactcgggtgctgctgggaacagcgccgggcccaagtccatggaggtctcctgctag

SEQ ID NO: 945 - DNA, 1113 bp, Homo Sapiens
atgtcactgcatcagtttttactagagccaatcacctgtcatgcctggaacagggatcgtactcagattgccctcagtcccaataatcacgaagtgcacatctataagaagaacgggagccagtgggtgaaagctcatgaactcaaggagcacaacggacacatcacaggtattgactgggctcccaagagcgaccgcattgtcacttgtggggcagaccgcaatgcctatgtctggagtcagaaagatggtgtttggaagccaaccctggtgatcctgagaattaatcgcgcagctacttttgtgaagtggtcccccctagagaacaaatttgctgtgggaagtggagcacgactcatttctgtttgttactttgagtctgaaaatgactggtgggtgagcaagcacattaaaaagccgattcgctccacagtcctcagcttggattggcatcccaacaacgttttgctggcagcaggatcatgtgacttcaaatgcagagtgttttctgcctacattaaagaagtggatgaaaagccagccagcacgccctggggcagcaagatgccttttgggcagctgatgtcagagtttggtggcagtggcactggtggctgggtccacggggtaagcttctctgccagtgggagccgcctggcctgggtcagccacgacagcaccgtgtctgttgctgatgcctcaaaaagtgtgcaggtctcgactctgaagacagagttcctgccgctcctaagtgtgtcatttgtctcagagaacagcgtcgtggctgctggccatgactgctgcccaatgctctttaactacgatgaccgcggctgcctgaccttcgtctccaagttagatattccaaaacagagcatccaacgcaacatgtctgccatggaacgcttccgcaacatggacaagagagccacaactgaggaccgcaacacggccttggagacgctgcaccagaatagcatcactcaagtctctatttatgaggtggacaagcaagattgtcgcaaattttgcactactggcatcgatggagccatgacaatttgggatttcaagaccctcgagtcttccatccagggcctccggataatgtga

SEQ ID NO: 946 - DNA, 582 bp, Homo Sapiens
atgaccctctgtccccaggcctggctccccgagggctcagaagagcagcttcggtgtgcagatcatccgtcgtgtggggttctcagtgccggagcttggggtgggggccaggcctcgcacttgcagaggagcccagtgggctgcacgctcccctccatccccatcggccctgtcccctggagtgtgtcagagcccaggggagaatgcagcccaccaggagcacctggaccccctgcccgccacatggtgtggccatcactcagcccctacccctgccctgctcctaagggtagaaaactccagggtcccctgccaccgactgcccagccactccaagccccctggcagctgcccctcctggagcagaaagtgcctttatctcagccatccgcagactgctggccagatgcggggacaggctggaatgagggaggcgtcttcatctccctgccatccccctctcacgccacccccgcccccaccgggctgcaggtgctgctgatgcgctgggatctgattgaggataaaaaggaaggagagatgacccctaccccctcatcccccagttttgaaaaggtctaa

SEQ ID NO: 947 - DNA, 4827 bp, Homo Sapiens
atgtattcggcccacaggcccctgatgcccgcgtccagcgcggcctcccgtggcctcggcatgttcgtgtggacgaatgtggaacctcgctctgtggctgtgttcccttggcactccttagtccccttcctggcacccagccagcctgacccctccgtgcagccgagcgaggcccagcaacctgccagccacccagtggcctccaaccagagcaaagaacctgctgagtcggcagctgttgctcatgaacggccaccaggtgggacagggagtgctgaccctgagcggccccctggagccacatgccctgagagcccaggacccggacccccacaccctttgggggtggtggaatctggtaagggtccgcctcccaccacggaggaggaggcctccggccccccaggagagccccggctggacagtgagacagagagtgaccatgatgatgccttcctctccatcatgtctcctgagatccagttgcctctaccgcccggaaaacgtcggacccagtccctcagtgccctacccaaggaacgggactcatcttctgagaaggatggacgcagccccaacaagcgggagaaggaccacatccggcggcccatgaatgccttcatgatcttcagcaagcggcaccgggccctggtccaccagcgtcatcccaaccaggacaaccggaccgtcagcaagatcctgggcgagtggtggtatgccctggggcccaaggagaagcagaagtaccacgacctggccttccaggtgaaggaggcccacttcaaggcccacccagattggaagtggtgcaacaaggaccgaaagaagtccagctcagaggccaagcccacgagcctggggctggcaggagggcacaaggagacgcgggagcggagcatgtcggagacgggcactgctgctgcccctggggtgtcctctgagctcctgtccgttgcagcccagacactcctgagctcagacaccaaggctccggggagcagctcctgtggggcagaacggctacacacagttgggggacctggctcagcccggccccgagctttctcccacagcggggtacacagcctggacggcggagaagtagacagtcaggcgctacaggaactgacgcagatggtgtctggccctgcatcgtactctggcccaaagccttctacccagtatggagctccaggaccctttgcagcccctggtgagggaggtgccttggcggccactgggcggcccccgctgctgcccacccgagcttctcgttctcagcgtgcggccagtgaggacatgacgagtgatgaggagcgcatggtcatctgtgaggaggaaggggatgatgatgtcattgctgacgatggcttcggcaccactgacattgatctcaagtgcaaggagcgggtgaccgacagcgagagtggggacagctctggggaggacccagagggcaacaagggctttggtcggaaggtgttttcacctgtgatccgttcctcctttacccactgccgccccccactggaccctgagcccccagggcccccggatcctcctgtagcctttggcaaaggctatggttccgccccatcctcctctgcgtcctcgcctgcttcctcctcagcctcggcagccacctccttctcactgggctcaggaaccttcaaggcccaggagtctggtcagggcagcacagcgggccccctacggcccccaccccctggggctgggggtccagcgacaccttccaaggcaacccggttcctcccaatggatcctgccaccttccggcgcaagagacccgaaagtgtgggtggcctggagccaccaggcccctcagtcatcgcggcccctcccagcggaggaggaaacatcctgcagacactggtgctgcccccaaacaaggaggagcaagagggcggcggagccagagtgccctccgcccccgccccatcactggcctatggggccccagcagctcccctgtcccgtcctgccgccaccatggtcaccaatgtggtgcggcctgtcagcagcactcctgtgcccatcgcctctaagcccttccccacctctggccgggctgaggcgtctccaaatgacacagcaggtgccaggactgaaatgggcactgggtctcgggtgcctgggggctccccgctgggtgtcagcttagtgtattcggacaagaagtcggcagcagccacctcaccagccccacacttggtggctggacccctgctgggcactgtggggaaggcgcctgccactgtcactaacctactggtgggcaccccggggtatggggcccctgcgccccctgctgtccagttcattgcccagggggcccctggtggtgggaccactgcgggctcaggagcaggtgctgggagtggccccaatgggccagtacccctgggcatcctgcaaccaggtgccctgggcaaggctgggggaatcacccaggtacagtacatcctgcccacgctgccccagcagcttcaggtggcacctgccccagcaccagcccctgggaccaaggcagcggctcccagcggccctgcacccaccaccagcatccgtttcaccctcccaccgggcacttccaccaacggcaaagtcctggctgccactgcacccactcctggcatccccatcctgcagtctgtaccctccgccccaccccccaaagcccagtcagtttctcccgtgcaggccccgcccccgggtggctcagcccagctgctgcctgggaaggtcctagtgcctctggccgcccctagcatgtcagtgcggggtggaggggccggccagccactgccactggtgagcccgcccttctcagtacctgtgcagaatggtgcccagccccccagcaagatcatccagctgaccccggtgcctgtgagcacacccagcggcctggtgccgcccctgagcccagccacactccctggacccacctctcagcctcagaaggtcctgttgccctcctccaccagaatcacctatgtgcagtcagcgggcgggcacgcgctgcccctgggtaccagccctgcgtccagccaggctggaacagtcacctcgtacgggcccacgagctctgtagctctaggcttcacctcgctggggcccagcggccccgccttcgtgcagcccctgctctcagcaggccaagccccactgctggctcccggtcaggtgggcgtgtcacctgtgcccagtccccagctgccgcctgcctgtgcagcccccggaggtcctgtcataacagcattttactctggcagccctgcacccacctcctcagcacccctggcccagccatcccaggcccccccaagcctggtctacactgtggccaccagcacaaccccacctgcagccaccattctgcccaagggcccgccagcccctgccactgccaccccagccccgactagccctttccccagcgccacagcaggttccatgacctacagcttagtggcccccaaggcccagcggcccagcccgaaggccccccagaaagtgaaggcagccatcgccagcattcccgtggggtcctttgaggcaggtgcctctgggcggcctggccctgcaccccggcagcctctggagcctggcccagtccgagagccaactgccccagagtctgagcttgaggggcagcccacaccaccagcccctccacccctgccagagacctggactcccacggcccggagcagccccccactgcccccacctgctgaggagcggaccagcgccaagggccctgagaccatggccagcaaattccccagctcatcttcagactggcgcgtccctgggcagggcctggagaatcgtggggagcctcccactcctcccagcccggccccagctccagctgtagcccctggtggcagcagcgagagcagcagtgggcgggcagccggggacaccccggagcgcaaggaggcggctggtactggcaagaaggtgaaggtgcggcccccgcccctgaagaagacctttgactctgtggacaacagggtcctgtcagaagtggacttcgaagagcgctttgctgagttgcctgagtttcggcctgaggaggtgctgccctcccccaccctgcagtctctggccacctcaccccgggccatcctgggctcttaccgcaagaagaggaagaactccacggacctggattcagcacccgaggaccccacctcgcccaagcgcaagatgagaagacgctccagctgcagctcggagcccaacacccccaagagtgccaagtgcgagggggacatcttcacctttgaccgtacaggtacagaagccgaggacgtgcttggggagctagagtatgacaaggtgccatactcctccctgcggcgcaccctggaccagcgccgggccctggtcatgcagctctttcaggaccatggcttcttcccgtcagcccaggccacagccgccttccaggcccgctatgcagacatctttccctccaaggtttgtctgcagttgaagatccgtgaggtgcgccagaagatcatgcaggctgccactcccacggagcagccccctggagctgaggctcctctccctgtaccgccccccactggcaccgctgctgcccctgcccccactcccagccccgcagggggccctgaccccacctcacccagctcggactctggcacggcccaggctgccccgccactgcctccacccccagagtcggggcctggacagcctggctgggagggggctccccagccctcccccccacccccaggtccctccacagctgccacaggcaggtga

SEQ ID NO: 948 - DNA, 654 bp, Homo Sapiens
atgggcagcactgtcccgcgctccgcctccgtgctgcttctgctgctgctcctgcgccgggccgagcagccctgcggggccgagctcaccttcgagctgccggacaacgccaagcagtgcttccacgaggaggtggagcagggcgtgaagttctccctggattaccaggtcatcactggaggccactacgatgttgactgctatgtagaggacccccaggggaacaccatctacagagaaacgaagaagcagtacgacagcttcacgtaccgggctgaagtcaagggcgtttatcagttttgcttcagtaatgagttttccaccttctctcacaagaccgtctactttgactttcaagtgggcgatgagcctcccattctcccagacatggggaacagggtcacagctctcacccagatggagtccgcctgcgtgaccatccatgaggctctgaaaacggtgattgactcccagacgcattaccggctgcgggaggcccaggaccgggcccgagcggaagaccttaatagccgagtctcttactggtctgttggcgagacgattgccctgttcgtggtcagcttcagtcaggtgctactgttgaaaagcttcttcacagaaaaacgacccatcagcagggcagtccactcctag

SEQ ID NO: 949 - DNA, 1911 bp, Homo Sapiens
atgaaccccagtgcccccagctaccccatggcctcgctctacgtgggggacctccaccccgacgtgaccgaggcgatgctctacgagaagttcagcccggccgggcccatcctctccatccgggtctgcagggacatgatcacccgccgctccttgggctacgcgtatgtgaacttccagcagccggcggacgcggagcgtgctttggacaccatgaattttgatgttataaagggcaagccagtacgcatcatgtggtctcagcgtgatccatcacttcgcaaaagtggagtaggcaacatattcattaaaaatctggacaaatccattgataataaagcactgtatgatacattttctgcttttggtaacatcctttcatgtaaggtggtttgtgatgaaaatggttccaagggctatggatttgtacactttgagacgcaggaagcagctgaaagagctattgaaaaaatgaatggaatgctcctaaatgatcgcaaagtatttgttggacgatttaagtctcgtaaagaacgagaagctgaacttggagctagggcaaaagaattcaccaatgtttacatcaagaattttggagaagacatggatgatgagcgccttaaggatctctttggcaagtttgggcctgccttaagtgtgaaagtaatgactgatgaaagtggaaaatccaaaggatttggatttgtaagctttgaaaggcatgaagatgcacagaaagctgtggatgagatgaacggaaaggagctcaatggaaaacaaatttatgttggtcgagctcagaaaaaggtggaacggcagacggaacttaagcgcaaatttgaacagatgaaacaagataggatcaccagataccagggtgttaatctttatgtgaaaaatcttgatgatggtattgatgatgaacgtctccggaaagagttttctccatttggtacaatcactagtgcaaaggttatgatggagggtggtcgcagcaaagggtttggttttgtatgtttctcctccccagaagaagccactaaagcagttacagaaatgaacggtagaattgtggccacaaagccattgtatgtagctttagctcagcgcaaagaagagcgccaggctcacctcactaaccagtatatgcagagaatggcaagtgtacgagctgttcccaaccctgtaatcaacccctaccagccagcacctccttcaggttacttcatggcagctatcccacagactcagaaccgtgctgcatactatcctcctagccaaattgctcaactaagaccaagtcctcgctggactgctcagggtgccagacctcatccattccaaaatatgcccggtgctatccgcccagctgctcctagaccaccatttagtactatgagaccagcttcttcacaggttccacgagtcatgtcaacacagcgtgttgctaacacatcaacacagacaatgggtccacgtcctgcagctgcagccgctgcagctactcctgctgtccgcaccgttccacagtataaatatgctgcaggagttcgcaatcctcagcaacatcttaatgcacagccacaagttacaatgcaacagcctgctgttcatgtacaaggtcaggaacctttgactgcttccatgttggcatctgcccctcctcaagagcaaaagcaaatgttgggtgaacggctgtttcctcttattcaagccatgcaccctactcttgctggtaaaatcactggcatgttgttggagattgataattcagaacttcttcatatgctcgagtctccagagtcactccgttctaaggttgatgaagctgtagctgtactacaagcccaccaagctaaagaggctgcccagaaagcagttaacagtgccaccggtgttccaactgtttaa

SEQ ID NO: 950 - DNA, 1188 bp, Homo Sapiens
atggacttcaacatgaagaagctggcgtcggacgcgggcatcttcttcacccgggcggtgcagttcacggaggagaaatttggccaggctgagaagactgagcttgatgcccactttgaaaaccttctggcccgggcagacagcaccaagaactggacagagaagatcttgaggcagacagaggtgctgctgcagcccaaccccagtgcccgagtggaggagttcctgtatgagaagctggacaggaaggtcccctcaagggtcaccaacggggagctgctggctcagtacatggcagacgcggccagtgagctggggccgaccaccccctatgggaagacactgatcaaggtggcagaagctgaaaagcaactgggagccgcggagagggattttatccacacggcctccatcagcttcctcacacccttgcgcaacttcctggagggggactggaagaccatctcgaaggagaggcggctcctccaaaaccggcgtctggacttggatgcctgcaaagcgaggctgaagaaggccaaggctgcagaagccaaagccacgacggtgcctgactttcaggagactagacctcgtaattacattctctcggccagcgcctccgcgctctggaatgatgaagtggacaaggccgagcaggagctccgcgtggcccagacagagtttgaccggcaagcagaagtgacccgtctcttgctggagggaatcagtagcactcacgtgaaccacctgcgctgcctccacgagttcgtcaagtctcagacaacctactacgcacagtgctaccgccacatgctggacttgcagaagcagctgggcagatttcccggcaccttcgtgggcaccacagagcccgcctccccacccctgagcagcacctcacccaccactgctgcggccactatgcctgtggtgccctctgtggccagcctggcccctccaggggaggcctcgctctgcctggaagaggtggccccccctgccagtgggacccgcaaagctcgggtgctctatgactacgaggcagccgacagcagtgagctggccctgctggctgatgagctcatcactgtctacagcctgcctggcatggaccctgactggctcattggcgagagaggcaacaagaagggcaaggtccctgtcacctacttggaactgctcagctag

SEQ ID NO: 951 - DNA, 1842 bp, Homo Sapiens
atgggcgccctcaggcccacgctgctgccgccttcgctgccgctgctgctgctgctaatgctaggaatgggatgctgggcccgggaggtgctggtccccgaggggcccttgtaccgcgtggctggcacagctgtctccatctcctgcaatgtgaccggctatgagggccctgcccagcagaacttcgagtggttcctgtataggcccgaggccccagatactgcactgggcattgtcagtaccaaggatacccagttctcctatgctgtcttcaagtcccgagtggtggcgggtgaggtgcaggtgcagcgcctacaaggtgatgccgtggtgctcaagattgcccgcctgcaggcccaggatgccggcatttatgagtgccacaccccctccactgatacccgctacctgggcagctacagcggcaaggtggagctgagagttcttccagatgtcctccaggtgtctgctgcccccccagggccccgaggccgccaggccccaacctcacccccacgcatgacggtgcatgaagggcaggagctggcactgggctgcctggcgaggacaagcacacagaagcacacacacctggcagtgtcctttgggcgatctgtgcccgaggcaccagttgggcggtcaactctgcaggaagtggtgggaatccggtcagacttggccgtggaggctggagctccctatgctgagcgattggctgcaggggagcttcgtctgggcaaggaagggaccgatcggtaccgcatggtagtagggggtgcccaggcaggggacgcaggcacctaccactgcactgccgctgagtggattcaggatcctgatggcagctgggcccagattgcagagaaaagggccgtcctggcccacgtggatgtgcagacgctgtccagccagctggcagtgacagtggggcctggtgaacgtcggatcggcccaggggagcccttggaactgctgtgcaatgtgtcaggggcacttcccccagcaggccgtcatgctgcatactctgtaggttgggagatggcacctgcgggggcacctgggcccggccgcctggtagcccagctggacacagagggtgtgggcagcctgggccctggctatgagggccgacacattgccatggagaaggtggcatccagaacataccggctacggctagaggctgccaggcctggtgatgcgggcacctaccgctgcctcgccaaagcctatgttcgagggtctgggacccggcttcgtgaagcagccagtgcccgttcccggcctctccctgtacatgtgcgggaggaaggtgtggtgctggaggctgtggcatggctagcaggaggcacagtgtaccgcggggagactgcctccctgctgtgcaacatctctgtgcggggtggccccccaggactgcggctggccgccagctggtgggtggagcgaccagaggacggagagctcagctctgtccctgcccagctggtgggtggcgtaggccaggatggtgtggcagagctgggagtccggcctggaggaggccctgtcagcgtagagctggtggggccccgaagccatcggctgagactacacagcttggggcccgaggatgaaggcgtgtaccactgtgcccccagcgcctgggtgcagcatgccgactacagctggtaccaggcgggcagtgcccgctcagggcctgttacagtctacccctacatgcatgccctggacaccctatttgtgcctctgctggtgggtacaggggtggccctagtcactggtgccactgtccttggtaccatcacttgctgcttcatgaagaggcttcgaaaacggtga

SEQ ID NO: 952 - DNA, 1149 bp, Homo Sapiens
atgttacggtggacagtgcacctggagggcgggccccgcagggtgaaccatgctgcagtggctgtcgggcatcgggtatactccttcgggggttactgctctggtgaagactatgagacactgcgtcagatagatgtgcacattttcaatgcagtgtccttgcgttggacaaagctgcccccggtgaagtctgccatccgtgggcaagctcctgtggtaccctacatgcgctatggacactcaaccgtcctcatcgacgacacagtcctcctttggggcgggcggaatgacaccgaaggggcctgcaatgtgctctatgcctttgacgtcaatacgcacaagtggttcacaccccgagtgtcagggacagttcctggggcccgggatggacattcagcctgtgtcctaggcaagatcatgtacatttttgggggctacgagcagcaggcggactgtttttccaatgacattcacaagctagataccagcaccatgacatggactcttatctgtacaaagggcagccctgcacgctggagggacttccactcagccacaatgctgggaagtcacatgtatgtctttgggggccgtgccgaccgctttgggccattccattccaacaatgagatttactgcaaccgcattcgagtctttgacaccagaactgaggcttggctggactgtcccccgactccagtgctgcctgaggggcgccggagccactcggcctttggctacaatggggagctgtacatctttggtggttataatgcaaggctgaaccggcacttccatgacctctggaagtttaatcctgtgtcctttacctggaaaaagattgaaccgaaggggaaggggccatgtccccgccggcgccagtgctgctgtattgttggtgacaagattgtcctctttgggggtaccagtccatctcctgaggaaggcctgggagatgaatttgaccttatagatcattctgacttacacattttggactttagccctagtctgaagactctgtgcaaactggccgtgattcagtataacctagaccagtcctgtttgcctcatgatatcaggtgggagctgaatgccatgaccaccaacagcaatatcagtcgccccatcgtctcctcccatgggtag

SEQ ID NO: 953 - DNA, 759 bp, Homo Sapiens
atgcagttgccccccgcgctgtgcgcccgcctcgctgcggggcccggggcggcggagccactgcctgtagagcgggatcccgcggctggggccgcgccctttcgcttcgttgcgcgccccgtgcgcttcccgcgggagcaccagttcttcgaggatggggacgtgcagcgccacctctacctccaggacgtgatcatgcaggtggccgacgtgcctgagaagcccagggtgcccgcgtttgcctgccaggtggccggctgctgccaggtgttcgatgccctggacgactacgagcaccactaccacacgctgcacggaaatgtttgctccttttgcaagcgggccttcccttccggacacctgctggacgcccacatcctggagtggcacgattcgctcttccagatcctgtctgagaggcaggacatgtatcagtgcttggtagaaggctgcacagagaagttcaagaccagcagagaccggaaggatcacatggtgaggatgcacctgtaccccgcggacttccggtttgataagccaaagaaaagcagaagcccagcctcagcagaagccccaggggacagtggagagcggtcagaaggggaggccatggaaatctgctctgagcctgtggcagcctcccctgcaccggcaggtgagaggcggatctacagacatagaataccctctaccatctgctttggtcagggtgccgctcgaggatttaaaagcaacaagaagaaaaccaaacaatgctga

SEQ ID NO: 954 - DNA, 1386 bp, Homo Sapiens
atgaacaactttggtaatgaagagtttgactgccacttcctcgatgaaggttttactgccaaggacattctggaccagaaaattaatgaagtttcttcttctgatgataaggatgccttctatgtggcagacctgggagacattctaaagaaacatctgaggtggttaaaagctctccctcgtgtcacccccttttatgcagtcaaatgtaatgatagcaaagccatcgtgaagacccttgctgctaccgggacaggatttgactgtgctagcaagactgaaatacagttggtgcagagtctgggggtgcctccagagaggattatctatgcaaatccttgtaaacaagtatctcaaattaagtatgctgctaataatggagtccagatgatgacttttgatagtgaagttgagttgatgaaagttgccagagcacatcccaaagcaaagttggttttgcggattgccactgatgattccaaagcagtctgtcgtctcagtgtgaaattcggtgccacgctcagaaccagcaggctccttttggaacgggcgaaagagctaaatatcgatgttgttggtgtcagcttccatgtaggaagcggctgtaccgatcctgagaccttcgtgcaggcaatctctgatgcccgctgtgtttttgacatgggggctgaggttggtttcagcatgtatctgcttgatattggcggtggctttcctggatctgaggatgtgaaacttaaatttgaagagatcaccggcgtaatcaacccagcgttggacaaatactttccgtcagactctggagtgagaatcatagctgagcccggcagatactatgttgcatcagctttcacgcttgcagttaatatcattgccaagaaaattgtattaaaggaacagacgggctctgatgacgaagatgagtcgagtgagcagacctttatgtattatgtgaatgatggcgtctatggatcatttaattgcatactctatgaccacgcacatgtaaagccccttctgcaaaagagacctaaaccagatgagaagtattattcatccagcatatggggaccaacatgtgatggcctcgatcggattgttgagcgctgtgacctgcctgaaatgcatgtgggtgattggatgctctttgaaaacatgggcgcttacactgttgctgctgcctctacgttcaatggcttccagaggccgacgatctactatgtgatgtcagggcctgcgtggcaactcatgcagcaattccagaaccccgacttcccacccgaagtagaggaacaggatgccagcaccctgcctgtgtcttgtgcctgggagagtgggatgaaacgccacagagcagcctgtgcttcggctagtattaatgtgtag

SEQ ID NO: 955 - DNA, 348 bp, Homo Sapiens
atgcgctacgtcgcctcctacctgctggctgccctagggggcaactcctcccccagcgccaaggacatcaagaagatcttggacagcgtgggtatcgaggcggacgacgaccggctcaacaaggttatcagtgagctgaatggaaaaaacattgaagacgtcattgcccagggtattggcaagcttgccagtgtacctgctggtggggctgtagccgtctctgctgccccaggctctgcagcccctgctgctggttctgcccctgctgcagcagaggagaagaaagatgagaagaaggaggagtctgaagagtcagatgatgacatgggatttggcctttttgattaa

SEQ ID NO: 956 - DNA, 1824 bp, Homo Sapiens
atggaggcgccagccgccggcttgtttctgctcctgttgcttgggacttgggccccggcgccgggcagcgcctcctccgaggcaccgccgctgatcaatgaggacgtgaagcgcacagtggacctaagcagccacctggctaaggtgacggccgaggtggtcctggcgcacctgggcggcggctccacgtcccgagctacctctttcctgctggctttggagcctgagctcgaggcccggctggcgcacctgggcgtgcaggtaaagggagaagatgaggaagagaacaatttggaagtacgtgaaaccaaaattaagggtaaaagtgggagattcttcacagtcaagctcccagttgctcttgatcctggggccaagatttcagtcattgtggaaacagtctacacccatgtgcttcatccgtatccaacccagatcacccagtcagagaaacagtttgtggtgtttgaggggaaccattatttctactctccctatccaacgaagacacaaaccatgcgtgtgaagcttgcctctcgaaatgtggagagctacaccaagctggggaaccccacgcgctctgaggacctactggattatgggcctttcagagatgtgcctgcctatagtcaggatacttttaaagtacattatgagaacaacagccctttcctgaccatcaccagcatgacccgagtcattgaagtctctcactggggtaatattgctgtggaagaaaatgtggacttaaagcacacaggagctgtgcttaaggggcctttctcacgctatgattaccagagacagccagatagtggaatatcctccatccgttcttttaagaccatccttcctgctgctgcccaggatgtttattaccgggatgagattggcaatgtttctaccagccacctccttattttggatgactctgtagagatggaaatccggcctcgcttccctctctttggcgggtggaagacccattacatcgttggctacaacctcccaagctatgagtacctctataatttgggtgaccagtatgcactgaagatgaggtttgtggaccatgtgtttgatgaacaagtgatagattctctgactgtgaagatcatcctgcctgaaggagccaagaacattgaaattgatagtccctatgaaatcagccgtgccccagatgagctgcactacacctatctggacacatttggccgccctgtgattgttgcctacaagaaaaatctggtagaacagcacattcaggacattgtggtccactacacgttcaacaaggtgctcatgctgcaggagcccctgctggtggtggcggccttctacatcctgttcttcaccgttatcatctatgttcggctggacttctccatcaccaaggatccagccgcagaagccaggatgaaggtagcctgcatcacagagcaggtcttgaccctggtcaacaagagaataggcctttaccgtcactttgacgagaccgtcaataggtacaagcaatcccgggacatctccaccctcaacagtggcaagaagagcctggagactgaacacaaggccttgaccagtgagattgcactgctgcagtccaggctgaagacagagggctctgatctgtgcgacagagtgagcgaaatgcagaagctggatgcacaggtcaaggagctggtgctgaagtcggcggtggaggctgagcgcctggtggctggcaagctcaagaaagacacgtacattgagaatgagaagctcatctcaggaaagcgccaggagctggtcaccaagatcgaccacatcctggatgccctgtag

SEQ ID NO: 957 - DNA, 7434 bp, Homo Sapiens
atggacccaagtggggtcaaagtgctggaaacagcagaggacatccaggagaggcggcagcaggtcctagaccgataccaccgcttcaaggaactctcaacccttaggcgtcagaagctggaagattcctatcgattccagttctttcaaagagatgctgaagagctggagaaatggatacaggaaaaacttcagattgcatctgatgagaattataaagacccaaccaacttgcagggaaagcttcagaagcatcaagcatttgaagctgaagtgcaggccaactcaggagccattgttaagctggatgaaactggaaacctgatgatctcagaagggcattttgcatctgaaaccatacggacccgtttgatggagctgcaccgccagtgggaattacttttggagaagatgcgagaaaaaggaatcaaactgctgcaggcccagaagttggtgcagtacttacgagaatgtgaggacgtgatggactggatcaatgacaaggaagcaattgttacttctgaagagctgggccaggatctggagcatgtagaggttttacagaagaaatttgaagagtttcaaacagatatggctgctcatgaagaaagagttaatgaagtgaaccagtttgctgccaaactcatacaggagcagcaccctgaggaggaactgatcaagactaagcaggatgaagtcaatgcagcctggcagcggctgaagggcctggctctgcagaggcaggggaagctctttggggcagcagaagttcagcgctttaacagggatgtggatgagactatcagttggattaaggaaaaggagcagttaatggcctctgatgattttggccgagacctggcaagtgttcaggctctgcttcggaagcacgagggtctggagagagatcttgctgctctagaagacaaggtcaaagccctgtgtgctgaggctgaccgcctgcaacagtcccaccctctgagtgcaacacagattcaagtgaagcgagaggaactgattacaaactgggagcagatccgcaccttggcggcagagagacatgcacggctcaatgattcatacaggcttcaacgcttccttgctgacttccgtgacctcaccagctgggtgactgagatgaaagccctcatcaatgcagatgagcttgccagtgatgtggctggggctgaagccctgctagatagacaccaagagcacaagggtgaaattgatgcccatgaagacagcttcaaatctgcagatgaatctggacaggcactgcttgctgctggtcactatgcctcagatgaagtgagggagaagctgaccgtcctttccgaggagagagcggcgctgctggagctgtgggagctgcgcaggcagcagtacgagcagtgcatggacctgcagctcttctaccgggacactgagcaggtggacaactggatgagcaagcaggaggcgttcctgttgaatgaagacttgggagattccttggatagtgtggaagcgcttcttaagaagcacgaagactttgagaaatcccttagtgcccaggaggaaaagattacagcattagatgaatttgcaaccaagctaattcagaacaaccactatgcaatggaagatgtggccactcgccgagatgctctgttgagccgccgcaatgcccttcacgagagagccatgcgtcgccgggcccagctagccgattctttccatctgcagcagtttttccgtgattctgatgagctcaagagttgggtcaatgagaagatgaaaactgccacagatgaagcttataaagatccatccaacctacaaggaaaagtacagaagcatcaggcttttgaggctgagctctcagcaaaccagagccgaattgatgccttggagaaagctggccaaaagctgattgatgtcaaccactatgccaaggatgaagtggcagctcgtatgaatgaggtgatcagtttgtggaagaaactgctagaggccactgaactgaaaggaataaagcttcgtgaagccaaccagcaacagcaatttaatcgcaatgttgaggatattgaattgtggctatatgaagtagaaggtcacttggcttcggatgattacggcaaagatcttaccaatgtgcagaacctccagaagaaacatgccctgctagaggcagatgtggctgctcaccaggaccgaattgatggcatcaccattcaggcccgccagttccaagatgctggccattttgatgcagaaaacatcaagaagaaacaggaagccctcgtggctcgctatgaggcactcaaggagcccatggttgcccggaagcagaagctggccgattctctgcggttgcagcagctcttccgggatgttgaggatgaggagacgtggattcgagagaaagagcccattgccgcatctaccaacagaggtaaggatttaattggggtccagaatctgctaaagaaacatcaagccttacaagcagaaattgctggacatgaaccacgcatcaaagcagttacacagaaggggaatgccatggtggaggaaggccattttgctgcagaggatgtgaaggccaagcttcacgagctgaaccaaaagtgggaggcactgaaagccaaagcttcccagcgtcggcaggacctggaggactctctgcaggcccagcagtactttgctgatgctaacgaggctgaatcctggatgcgggagaaggaacccattgtgggcagcactgactatggcaaggacgaagactctgctgaggctctactgaagaaacacgaagctttgatgtcagatctcagtgcctacggcagcagcatccaggctttgcgagaacaagcacagtcctgccggcaacaagtggcccccacggatgatgagactgggaaggagctggtcttggctctctacgactatcaggagaagagtccccgagaggtcaccatgaagaagggagatatccttaccttactcaacagcaccaacaaggattggtggaaagtggaagtgaacgatcgtcagggttttgtgccggctgcgtacgtgaagaaattggaccccgcccagtcagcctcccgggagaatctcctggaggagcaaggcagcatagcactgcggcaggagcagattgacaatcagacacgcataactaaggaggccggcagtgtatctctgcgtatgaagcaggtggaagaactatatcattctctgctggaactgggtgagaagcgtaaaggcatgttggagaagagttgcaagaagtttatgttgttccgtgaagcgaatgaactacagcaatggatcaatgagaaggaagccgctctgacaagtgaggaggtcggagcagacttggagcaggttgaggtgctccagaagaagtttgatgacttccagaaggacctgaaggccaatgagtcacggttgaaggacattaacaaggtagctgaagacctggagtctgaaggtctcatggcagaggaggtgcaggctgtgcaacaacaggaagtgtatggcatgatgcccagggatgaaactgattccaagacagcctccccgtggaagtctgctcgtctgatggttcacaccgtggccacctttaattccatcaaggagctgaatgagcgctggcggtccctacagcagctggccgaggaacggagccagctcttgggcagcgcccatgaagtacagaggttccacagagatgctgatgaaaccaaagaatggattgaagagaagaatcaagctctaaacacagacaattatggacatgatctcgccagtgtccaggccctgcaacgcaagcatgagggcttcgagagggaccttgcggctctcggtgacaaggtaaactcccttggtgaaacagcagagcgcctgatccagtcccatcccgagtcagcagaagacctgcaggaaaagtgcacagagttaaaccaggcctggagcagcctggggaaacgtgcagatcagcgcaaggcaaagttgggtgactcccacgacctgcagcgcttccttagcgatttccgggacctcatgtcttggatcaatggaatacgggggttggtgtcctcagatgagctagccaaggatgtcaccggagctgaggcattgctggagcgacaccaggaacaccggacagaaatcgatgccagggctggcactttccaggcatttgagcagtttggacagcagctgttggctcacggacactatgccagccctgagatcaagcagaaacttgatattcttgaccaggagcgtgcagacctggagaaggcctgggttcagcgcaggatgatgctggatcagtgccttgaactgcagctgttccatcgggactgtgagcaagctgagaactggatggctgcccgggaggccttcttgaataccgaagacaaaggagactcactggacagcgtagaggctctgatcaaaaaacatgaagactttgacaaagcgattaacgtccaggaagagaagattgctgctctgcaggcctttgccgaccagctcatcgctgccggccattatgccaagggagacatttctagccggcgcaatgaggtcttggacaggtggcgacgtctgaaagcccagatgattgagaaaaggtcaaagctaggagaatctcaaaccctccaacagttcagccgggatgtggatgagattgaggcttggatcagtgaaaaattgcaaacagcgagtgatgagtcgtacaaggatcccaccaacatccagctttccaagctgctgagcaagcaccagaagcaccaggcttttgaagcagagctgcatgccaacgctgaccggatccgtggggttatcgacatgggcaactccctcattgaacgtggagcctgtgccggcagtgaggatgctgtcaaggcccgcctggctgccttagctgaccagtggcagttcttggtgcaaaagtcagcggaaaagagccagaaactgaaagaagccaacaagcagcagaacttcaacacagggatcaaggactttgacttctggctgtctgaggtggaggccctgctggcatccgaagattatggcaaagacctggcttctgtgaacaacctgctgaaaaagcatcaactgctggaagcagatatatctgcccatgaggatcgcctgaaggacctgaacagccaggcagacagcctgatgaccagcagtgccttcgacacctcccaagtaaaggacaagagggacaccatcaacgggcgcttccagaagatcaagagcatggcggcctcccggcgagccaagctgaatgaatcccatcgcctgcaccagttcttccgggacatggatgacgaggagtcctggatcaaggagaagaagctgctggtgggctcagaggactacggccgggacctaaccggcgtgcagaacctgaggaagaagcacaagcggctggaagcagaactggctgcgcatgagccggctattcagggtgtcctggacactggcaagaagctgtccgatgacaacaccatcgggaaagaggagatccagcagcggctggcgcagtttgtggagcactggaaagagctgaagcagctggcagctgcccggggtcagcggctggaagagtccttggaatatcagcagtttgtagccaatgtggaagaggaagaagcctggatcaatgagaaaatgaccctggtggccagcgaagattatggcgacactcttgccgccatccagggcttactgaagaaacatgaagcttttgagacagacttcaccgtccacaaggatcgcgtgaatgatgtctgcaccaatggacaagacctcattaagaagaacaatcaccatgaggagaacatctcttcaaagatgaagggcctgaacgggaaagtgtcagacctggagaaagctgcagcccagagaaaggcgaagctggatgagaactcggccttccttcagttcaactggaaggcggacgtggtggagtcctggatcggtgaaaaggagaacagcttgaagacagatgattatggccgagacctgtcttctgtgcagacgctcctcaccaaacaggaaacttttgacgctgggctgcaggccttccagcaggaaggcattgccaacatcactgccctcaaagatcagcttctcgccgccaaacacgttcagtccaaggccatcgaggcccggcacgcctccctcatgaagaggtggagccagcttctggccaactcagccgcccgcaagaagaagcttctggaggctcagagtcacttccgcaaggtggaggacctcttcctgaccttcgccaaaaaggcttctgccttcaacagctggtttgaaaatgcagaggaggacttaacagaccccgtgcgctgcaactccttggaagaaatcaaagctttgcgcgaggcccacgacgccttccgctcctccctcagctctgcccaggctgacttcaaccagctggccgagctggaccgccagatcaagagcttccgcgtagcctccaacccctacacctggtttaccatggaggccctggaggagacctggaggaacctacagaaaatcatcaaggagagggagctggagctgcagaaggaacagcggcggcaggaggagaacgacaagctgcgccaggagtttgcccagcacgccaacgccttccaccagtggatccaagagaccaggacatacctcctcgatgggtcctgtatggtggaagagtcggggaccctcgaatcccagcttgaagctaccaaacgcaagcaccaggaaatccgagccatgagaagtcagctcaaaaagatcgaggacctgggggccgccatggaggaggccctcatcctggacaacaagtacacggagcacagcaccgtgggcctcgcccagcagtgggaccagctggaccagctgggcatgcgcatgcagcacaacctggagcagcagatccaggccaggaacacaacaggtgtgactgaggaggccctcaaagaattcagcatgatgtttaaacactttgacaaggacaagtctggcaggctgaaccatcaggagttcaaatcttgcctgcgctccctgggctatgacctgcccatggtggaggaaggggaacctgaccctgagttcgaggcaatcctggacacggtggatccgaacagagatggccatgtctccttgcaagaatacatggctttcatgatcagccgcgaaactgagaacgtcaagtccagcgaggagattgagagcgccttccgggccctcagctcagagggaaagccttacgtgaccaaggaggagctctaccagaacctgacccgggaacaagccgactactgcgtctcccacatgaagccctacgtggacggcaagggccgcgagctccccaccgcgttcgactacgtggagttcacccgctcgcttttcgtgaactga

SEQ ID NO: 958 - DNA, 2193 bp, Homo Sapiens
atgggcgtgtgccagcgcacgcgcgctccctggaaggagaagtctcagctagaacgagcggccctaggttttcggaagggaggatcagggatgtttgcgagcggctggaaccagacggtgccgatagaggaagcgggctccatggctgccctcctgctgctgcccctgctgctgttgctaccgctgctgctgctgaagctacacctctggccgcagttgcgctggcttccggcggacttggcctttgcggtgcgagctctgtgctgcaaaagggctcttcgagctcgcgccctggccgcggctgccgccgacccggaaggtcccgaggggggctgcagcctggcctggcgcctcgcggaactggcccagcagcgcgccgcgcacacctttctcattcacggctcgcggcgctttagctactcagaggcggagcgcgagagtaacagggctgcacgcgccttcctacgtgcgctaggctgggactggggacccgacggcggcgacagcggcgaggggagcgctggagaaggcgagcgggcagcgccgggagccggagatgcagcggccggaagcggcgcggagtttgccggaggggacggtgccgccagaggtggaggagccgccgcccctctgtcacctggagcaactgtggcgctgctcctccccgctggcccagagtttctgtggctctggttcgggctggccaaggccggcctgcgcactgcctttgtgcccaccgccctgcgccggggccccctgctgcactgcctccgcagctgcggcgcgcgcgcgctggtgctggcgccagagtttctggagtccctggagccggacctgcccgccctgagagccatggggctccacctgtgggctgcaggcccaggaacccaccctgctggaattagcgatttgctggctgaagtgtccgctgaagtggatgggccagtgccaggatacctctcttccccccagagcataacagacacgtgcctgtacatcttcacctctggcaccacgggcctccccaaggctgctcggatcagtcatctgaagatcctgcaatgccagggcttctatcagctgtgtggtgtccaccaggaagatgtgatctacctcgccctcccactctaccacatgtccggttccctgctgggcatcgtgggctgcatgggcattggggccacagtggtgctgaaatccaagttctcggctggtcagttctgggaagattgccagcagcacagggtgacggtgttccagtacattggggagctgtgccgataccttgtcaaccagcccccgagcaaggcagaacgtggccataaggtccggctggcagtgggcagcgggctgcgcccagatacctgggagcgttttgtgcggcgcttcgggcccctgcaggtgctggagacatatggactgacagagggcaacgtggccaccatcaactacacaggacagcggggcgctgtggggcgtgcttcctggctttacaagcatatcttccccttctccttgattcgctatgatgtcaccacaggagagccaattcgggacccccaggggcactgtatggccacatctccaggtgagccagggctgctggtggccccggtaagccagcagtccccattcctgggctatgctggcgggccagagctggcccaggggaagttgctaaaggatgtcttccggcctggggatgttttcttcaacactggggacctgctggtctgcgatgaccaaggttttctccgcttccatgatcgtactggagacaccttcaggtggaagggggagaatgtggccacaaccgaggtggcagaggtcttcgaggccctagattttcttcaggaggtgaacgtctatggagtcactgtgccagggcatgaaggcagggctggaatggcagccctagttctgcgtcccccccacgctttggaccttatgcagctctacacccacgtgtctgagaacttgccaccttatgcccggccccgattcctcaggctccaggagtctttggccaccacagagaccttcaaacagcagaaagttcggatggcaaatgagggcttcgaccccagcaccctgtctgacccactgtacgttctggaccaggctgtaggtgcctacctgcccctcacaactgcccggtacagcgccctcctggcaggaaaccttcgaatctga

SEQ ID NO: 959 - DNA, 1062 bp, Homo Sapiens
atgagccgcagcctggactcggcgcggagcttcctggagcggctggaagcgcggggcggccgggagggggcagtcctcgccggcgagttcagcaaaaggtgtgagcggtactgggcccaggagcaggagccactgcagactgggcttttctgcatcactctgataaaggagaagtggctgaatgaggacatcatgctcaggaccctcaaggtcacattccagaaggagtcccgttctgtgtaccagctacagtatatgtcctggccagaccgtggggtccccagcagtcctgaccacatgctcgccatggtggaggaagcccgtcgcctccagggatctggccctgaacccctctgtgtccactgcagtgcgggttgtgggcgaacaggcgtcctgtgcaccgtggattatgtgaggcagctgctcctgacccagatgatcccacctgacttcagtctctttgatgtggtccttaagatgaggaagcagcggcctgcggccgtgcagacagaggagcagtacaggttcctgtaccacacggtggctcagatgttctgctccacactccagaatgccagcccccactaccagaacatcaaagagaattgtgccccactctacgacgatgccctcttcctccggactccccaggcacttctcgccataccccgcccaccaggaggggtcctcaggagcatctctgtgcccgggtccccgggccacgccatggctgacacctacgcggtggtgcagaagcgcggggctccagcgggcgccgggagtgggacgcagacggggacggggacggggacgggggcgcgcagcgcggaggaggcgccgctctacagcaaggtgacgccgcgcgcccagcgacccggggcgcacgcggaggacgcgagggggacgctgcctggccgcgttcctgctgaccaaagtcctgccggatctggcgcctacgaggacgtggcgggtggagctcagaccggtgggctaggtttcaacctgcgcattgggaggccgaagggtccccgggacccgcctgctgagtggacccgggtgtaa

SEQ ID NO: 960 - DNA, 1011 bp, Homo Sapiens
atgctccagaggggcctctggccgtggcgcacgcggctgctgccgacccctggcacctggcgcccagcgcgcccgtggccgctgccgcctccgccccaggttttgcgtgtgaagctgtgtggaaatgtgaaatactaccagtcacaccattatagtaccgtggtgccacctgatgaaataacagttatttatagacatggccttcccttggtaacacttaccttgccatctagaaaagaacgttgtcaattcgtagtcaaaccaatgttgtcaacagttggttcattccttcaggacctacaaaatgaagataagggtatcaaaactgcagccatcttcacagcagatggcaacatgatttcagcttctaccttgatggatattttgctaatgaatgattttaaacttgtcattaataaaatagcatatgatgtgcagtgtccaaagagagaaaaaccaagtaatgagcacactgctgagatggaacacatgaaatctttggttcacagactatttacaatcttgcatttagaagagtctcagaaaaagagagagcaccatttactggagaaaattgaccacctgaaggaacagctgcagccccttgaacaggtgaaagctggaatagaagctcattcggaagccaaaaccagtggactcctgtgggctggattggcactgctgtccattcagggtggggcactggcctggctcacgtggtgggtgtactcctgggatatcatggagccagttacatacttcatcacatttgcaaattctatggtcttttttgcatactttatagtcactcgacaggattatacttactcagctgttaagagtaggcaatttcttcagttcttccacaagaaatcaaagcaacagcactttgatgtgcagcaatacaacaagttaaaagaagaccttgctaaggctaaagaatccctgaaacaggcgcgtcattctctctgtttgcaaatgcaagtagaagaactcaatgaaaagaattaa

SEQ ID NO: 961 - DNA, 555 bp, Homo Sapiens
atggtgcggaagcttaagttccacgagcagaagctgctgaagcaggtggacttcctgaactgggaggtcaccgaccacaacctgcacgagctgcgcgtgctgcggcgttaccggctgcagcggcgggaggactacacgcgctacaaccagctgagccgtgccgtgcgtgagctggcgcggcgcctgcgcgacctgcccgaacgcgaccagttccgcgtgcgcgcttcggccgcgctgctggacaagctgtatgctctcggcttggtgcccacgcgcggttcgctggagctctgcgacttcgtcacggcctcgtccttctgccgccgccgcctccccaccgtgctcctcaagctgcgcatggcgcagcaccttcaggctgccgtggcctttgtggagcaagggcacgtacgcgtgggccctgacgtggttaccgaccccgccttccttgtcacgcgcagcatggaggactttgtcacttgggtggactcgtccaagatcaagcggcacgtgctagagtacaatgaggagcgcgatgacttcgatctggaagcctag

SEQ ID NO: 962 - DNA, 1200 bp, Homo Sapiens
atggcgcacattaccattaaccagtacctgcagcaggtgtacgaagccatcgacagcagagatggagcatcttgtgcagagttggtgtcttttaaacatcctcatgttgcaaacccacgacttcaaatggcctctccagaggagaagtgtcaacaagtcttggaacccccttatgatgaaatgtttgcagctcatttaaggtgcacttatgcagtggggaatcatgacttcatagaggcatacaagtgccagaccgtgatagtccaatcattcttgcgagcattccaggcccacaaagaagaaaactgggctctgcctgtcatgtatgcagtagcgcttgaccttcgagtgtttgccaataatgcagatcaacagttggtaaagaaaggaaaaagcaaagttggggacatgttggaaaaagcagcagagttactgatgagctgtttccgggtctgtgccagcgacacccgtgctggtatagaggactctaagaagtggggcatgctgtttctggtgaaccagctgtttaaaatctacttcaagatcaacaaactccatttatgtaaacccctaattagagcaattgacagctcaaacctgaaagacgattacagcactgcacagagagtaacatacaaatactacgttggacgcaaggctatgtttgacagcgattttaagcaagctgaggagtacctgtcatttgcctttgagcattgtcaccgttctagtcagaagaacaaaaggatgattctgatctatttgcttccagtaaaaatgctattgggtcacatgcccactgtggagctcctgaaaaagtatcacctgatgcagtttgcggaagtaaccagagctgtgagcgagggcaacctgctgctgctgcacgaggcgctggcgaagcacgaggccttcttcattcgctgcggaatcttcctcatcctggagaagctgaagatcatcacctacaggaacctctttaagaaagtgtatttgttactgaaaacacaccagctgtctctggatgcttttctggttgccttgaagttcatgcaggtggaggacgtggacattgacgaagttcagtgtattctggctaacttgatatacatgggacacgtcaaaggctacatatcgcatcagcatcagaagctggtggtcagcaagcagaacccatttcctcccctgtccacggtgtgttga

SEQ ID NO: 963 - DNA, 18921 bp, Homo Sapiens
atgtcggtgttcctggggccagggatgccctctgcatctttattagtaaatcttctttcagctttactcatcctatttgtgtttggagaaacagaaataagatttactggacaaactgaatttgttgttaatgaaacaagtacaacagttattcgtcttatcattgaaaggataggagagccagcaaatgttactgcaattgtatcgctgtatggagaggacgctggtgacttttttgacacatatgctgcagcttttatacctgccggagaaacaaacagaacagtgtacatagcagtatgtgatgatgacttaccagagcctgacgaaacttttatttttcacttaacattacagaaaccttcagcaaatgtgaagcttggatggccaaggactgttactgtgacaatattatcaaatgacaatgcatttggaattatttcatttaatatgcttccctcaatcgcagtgagtgagcccaagggcagaaatgagtctatgcctcttactctcatcagggaaaagggaacctatggaatggtcatggtgacttttgaggtagagggtggcccaaatccccctgatgaagatttgagtccagttaaaggaaatatcacctttccccctggcagagcaacagtaatttataacttgacagtactcgatgacgaggtaccagaaaatgatgaaatatttttaattcaactgaaaagtgtagaaggaggagctgagattaacacctctaggaattccattgagatcatcattaagaaaaatgatagtcccgtgagattccttcagagtatttatttggttcctgaggaagaccacatactcataattccagtagttcgtggaaaggacaacaatggaaatctgattggatctgatgaatatgaggtttcaatcagttatgctgtcacaactgggaattccacagcacatgcccagcaaaatctggacttcattgatcttcagccaaacacaactgttgtttttccaccttttattcatgaatctcacttgaaatttcaaatagttgatgacaccataccggagattgctgaatcgtttcacattatgttactaaaagataccttacagggagatgctgtgctaataagcccttctgttgtacaagtcaccattaagccaaatgataaaccttatggagtcctttcattcaacagtgttttgtttgaaaggacagttataattgatgaagatagaatatcaagatatgaagaaatcacagtggttagaaatggaggaacccatgggaatgtctctgcgaattgggtgttgacacggaacagcactgatccctcaccagtaacagcagatatcagaccgagctctggagttctccattttgcacaagggcagatgttggcaacaattcctcttactgtggttgatgatgatcttccagaagaggcagaagcttatctacttcaaattctgcctcatacaatacgaggaggtgcagaagtgagcgagccagcggagcttttgttctacattcaggatagtgatgatgtctatggcctaataacattttttcctatggaaaaccagaagattgaaagcagcccaggtgaacgatacttatccttgagttttacaagactaggagggactaaaggagatgtgaggttgctttattctgtactttacattcctgctggagctgtggaccccttgcaagcaaaagaaggcatcttaaatatatcaaggagaaatgacctcatttttccagagcaaaaaactcaagtcactacaaaattaccaataagaaatgatgcattccttcaaaatggagctcactttctagtacagttggaaactgtggagttgttaaacataattcctctaatcccacccataagccctagatttggggaaatctgcaatatttctttactggttactccagccattgcaaatggagaaattggctttctcagcaatcttccaattattttgcatgaaccagaagattttgctgctgaagtggtatacattcccttacatcgggatggaactgatggccaggctactgtctactggagtttgaagccctctggctttaattcaaaagcagtgaccccggatgatataggcccctttaatggctctgttttgtttttatctgggcaaagtgacacaacaatcaacattactatcaaaggtgatgacataccggaaatgaatgaaactgtaacactttctctagacagggttaacgtggaaaaccaagtgctgaaatctggatatactagccgtgacctaattattttggaaaatgatgaccctgggggagtttttgaattttctcctgcttccagaggaccctatgttataaaagaaggagaatctgtagagctccacatcatccgatcaagggggtcccttgttaagcagtttctacactaccgagtagagccaagagatagcaatgaattctatggaaacacgggagtactagaatttaaacctggagaaagggagatagtgatcaccttgctagcaagattggatgggataccagagttggatgaacactactgggtggtcctcagcagccacggagaacgggaaagcaagttgggaagtgccaccattgtcaatataacgattctgaaaaatgatgatcctcatggcattatagaatttgtttctgatggtctaattgtgatgataaatgaaagcaaaggagatgctatctatagtgctgtttatgatgtagtaagaaatcgaggcaactttggtgatgttagtgtatcatgggtggttagtccagactttacacaagatgtatttcctgtacaagggactgttgtctttggagatcaggaattttcaaaaaatatcaccatttactcccttccagatgagattccagaagaaatggaagaatttaccgttatcctactgaatggcactggaggagctaaagtgggaaatagaacaactgcaactctgaggattagaagaaatgatgaccccatttattttgcagaacctcgtgtagtgagggttcaggaaggtgagactgccaactttacagttctcagaaatggatctgttgatgtgacttgcatggtccagtatgctaccaaggatgggaaggctactgcaagagagagagatttcattcctgttgaaaaaggagaaacgctcatttttgaggttggaagtagacagcagagcatatccatatttgttaatgaagatggtatcccggaaacagatgagcccttttatataatcctcttgaattcaacaggtgatacagtagtatatcaatatggagtagctacagtaataattgaagctaatgatgacccaaatggcattttttctctggagcccatagacaaagcagtggaagaaggaaagactaatgcattttggattttgaggcaccgaggatactttggtagtgtttctgtatcttggcagctctttcagaatgattctgctttgcagcctgggcaggagttctatgaaacttcaggaactgttaacttcatggatggagaagaagcaaaaccaatcattctccatgcttttccagataaaattcctgaattcaatgaattttatttcctaaaacttgtaaacatttcaggtggatccccaggtcctgggggccagctagcagaaaccaacctccaggtgacagtaatggttccattcaatgatgatccctttggagtttttatcttggatccagagtgtttagagagagaagtggcagaagatgtcctgtctgaagatgatatgtcttatattaccaacttcaccattttgaggcagcagggtgtgtttggtgatgtacaactgggctgggaaatactgtccagtgagttccctgctggtttgccaccaatgatagattttttactggttggaattttccccaccaccgtgcatttacaacagcacatgcggcgtcaccacagtggaacggatgctttgtactttaccggactagagggtgcatttgggactgttaatccaaaataccatccctccaggaataatacaattgccaactttacattctcagcttgggtaatgcccaatgccaatacgaatggattcattatagcgaaggatgacggtaatggaagcatctactacggggtaaaaatacaaacaaacgaatcccatgtgacactttcccttcattataaaaccttgggttccaatgctacatacattgccaagacaacagtcatgaaatatttagaagaaagtgtttggcttcatctactaattatcctggaggatggtataatcgaattctacctggatggaaatgcaatgcccaggggaatcaagagtctgaaaggagaagccattactgacggtcctgggatactgagaattggagcagggataaatggcaatgacagatttacaggtctgatgcaggatgtgaggtcctatgagcggaaactgacgcttgaagaaatttatgaacttcatgccatgcccgcaaaaagtgatttacacccaatttctggatatctggagttcagacagggagaaactaacaaatcattcattatttctgcaagagatgacaatgacgaggaaggagaagaattattcattcttaaactagtttctgtatatggaggagctcgtatttcggaagaaaatactactgcaagattaacaatacaaaaaagtgacaatgcaaatggcttgtttggtttcacaggagcttgtataccagagattgcagaggagggatcaaccatttcttgtgtggttgagagaaccagaggagctctggattatgtgcatgttttttacaccatttcacagattgaaactgatggcattaattaccttgttgatgactttgctaatgccagtggaactattacattccttccttggcagagatcagaggttctgaatatatatgttcttgatgatgatattcctgaacttaatgagtatttccgtgtgacattggtttctgcaattcctggagatgggaagctaggctcaactcctaccagtggtgcaagcatagatcctgaaaaggaaacgactgatatcaccatcaaagctagtgatcatccatatggcttgctgcagttctccacagggctgcctcctcagcctaaggacgcaatgaccctgcctgcaagcagcgttccacatatcactgtggaggaggaagatggagaaatcaggttattggtcatccgtgcacagggacttctgggaagggtgactgcggaatttagaacagtgtccttgacagcattcagtcctgaggattaccagaatgttgctggcacattagaatttcaaccaggagaaagatataaatacattttcataaacatcactgataattctattcctgaactggaaaaatcttttaaagttgagttgttaaacttggaaggaggagtagctgaactctttagggttgatggaagtggtagtggtgatggggacatggaattcttccttccaactattcacaaacgtgccagtctaggagtggcttcccaaattctagtgacaattgcagcctctgaccacgctcatggcgtatttgaatttagccctgagtcactctttgtcagtggaactgaaccagaagatgggtatagcactgttacattaaatgttataagacatcatggaactctgtctccagtgactttgcattggaacatagactctgatcctgatggtgatctcgccttcacctctggcaacatcacatttgagattgggcagacgagcgccaatatcactgtggagatattgcctgacgaagacccagaactggataaggcattctctgtgtcagtcctcagtgtttccagtggttctttgggagctcatattaatgccacgttaacagttttggctagtgatgatccatatgggatattcattttttctgagaaaaacagacctgttaaagttgaggaagcaacccagaacatcacactatcaataataaggttgaaaggcctcatgggaaaagtccttgtctcatatgcaacactagatgatatggaaaaaccaccttattttccacctaatttagcgagagcaactcaaggaagagactatataccagcttctggatttgctctttttggagctaatcagagtgaggcaacaatagctatttcaattttggatgatgatgagccagaaaggtccgaatctgtctttatcgaactactcaactctactttagtagcgaaagtacagagtcgttcaattccaaattctccacgtcttgggcctaaggtagaaactattgcgcaactaattatcattgccaatgatgatgcatttggaactcttcagctctcagcaccaattgtccgagtggcagaaaatcatgttggacccattatcaatgtgactagaacaggaggagcatttgcagatgtctctgtgaagtttaaagctgtgccaataactgcaatagctggtgaagattatagtatagcttcatcagatgtggtcttgctagaaggggaaaccagtaaagccgtgccaatatatgtcattaatgatatctatcctgaactggaagaatcttttcttgtgcaactgatgaatgaaacaacaggaggagccagactaggggctttaacagaggcagtcattattattgaggcctctgatgacccctatggattatttggttttcagattactaaacttattgtagaggaacctgagtttaactcagtgaaggtaaacctgccaataattcgaaattctgggacactcggcaatgttactgttcagtgggttgccaccattaatggacagcttgctactggcgacctgcgagttgtctcaggtaatgtgacctttgcccctggggaaaccattcaaaccttgttgttagaggtcctggctgacgacgttccggagattgaagaggttatccaagtgcaactaactgatgcctctggtggaggtactattgggttagatcgaattgcaaatattattattcctgccaatgatgatccttatggtacagtagcctttgctcagatggtttatcgtgttcaagagcctctggaaagaagttcctgtgctaatataactgtcaggcgaagcggagggcactttggtcggctgttgttgttctacagtacttccgacattgatgtagtggctctggcaatggaggaaggtcaagatttactgtcctactatgaatctccaattcaaggggtgcctgacccactttggagaacttggatgaatgtctctgccgtgggggagcccctgtatacctgtgccactttgtgccttaaggaacaagcttgctcagcgttttcatttttcagtgcttctgagggtccccagtgtttctggatgacatcatggatcagcccagctgtcaacaattcagacttctggacctacaggaaaaacatgaccagggtagcatctctttttagtggtcaggctgtggctgggagtgactatgagcctgtgacaaggcaatgggccataatgcaggaaggtgatgaattcgcaaatctcacagtgtctattcttcctgatgatttcccagagatggatgagagttttctaatttctctccttgaagttcacctcatgaacatttcagccagtttgaaaaatcagccaaccataggacagccaaatatttctacagttgtcatagcactaaatggtgatgcctttggagtgtttgtgatctacaatattagtcccaatacttccgaagatggcttatttgttgaagttcaggagcagccccaaaccttggtggagctgatgatacacaggacagggggcagcttaggtcaagtggcagtcgaatggcgtgttgttggtggaacagctactgaaggtttagattttataggtgctggagagattctgacctttgctgaaggtgaaaccaaaaagacagtcattttaaccatcttggatgactctgaaccagaggatgacgaaagtatcatagttagtttggtgtacactgaaggtggaagtagaattttgccaagctccgacactgttagagtgaacattttggccaatgacaatgtggcaggaattgttagctttcagacagcttccagatctgtcataggtcatgaaggagaaattttacaattccatgtgataagaactttccctggtcgaggaaatgttactgttaactggaaaattattgggcaaaatctagaactcaattttgctaactttagcggacaacttttctttcctgaggggtcgttgaatacaacattgtttgtgcatttgttggatgacaacattcctgaggagaaagaagtataccaagtcattctgtatgatgtcaggacacaaggagttccaccagccggaatcgccctgcttgatgctcaaggatatgcagctgtcctcacagtagaagccagtgatgaaccacatggagttttaaattttgctctttcatcaagatttgtgttactacaagaggctaacataacaattcagcttttcatcaacagagaatttggatctctaggagctatcaatgtcacatataccacggttcctggaatgctgagtctgaagaaccaaacagtaggaaacctagcagagccagaagttgattttgtccctatcattggctttctgattttagaagaaggggaaacagcagcagccatcaacattaccattcttgaggatgatgtaccagagctagaagaatatttcctggtgaatttaacttacgttggacttaccatggctgcttcaacttcatttcctcccagactagattcagaaggtttgactgcacaagttattattgatgccaatgatggggcccgaggtgtaattgaatggcaacaaagcaggtttgaagtaaatgaaacccatggaagtttaacattggtagcccagaggagcagagaacctcttggccatgtttccttatttgtgtatgctcagaatttggaagcacaagtggggctggattatatcttcaccccaatgattcttcattttgctgatggagaaaggtataaaaatgtcaatatcatgattcttgatgatgacattccagaaggagatgaaaaatttcagctgattttaacaaatccttctcctggactagagctagggaaaaatacaatagccttaattattgtccttgctaatgatgacggccctggagttctatcatttaacaacagtgagcactttttcctaagagagccaacagctctctacgtccaggagagtgttgcagtattgtacattgttcgggaacctgcacaaggattgtttggaacagtgacagttcagttcattgtgacagaagtgaattcctcaaatgaatctaaagatctgactccttccaaaggctatattgttttagaagaaggtgttcgattcaaggccctacaaatatctgccatattagacacggaaccagaaatggatgagtattttgtttgcaccttgtttaatccaactggaggtgctagactaggggtgcatgttcaaaccctgataacagttttgcaaaaccaggcccctttggggctattcagtatctctgcagttgaaaatagagccacctccatagacatcgaagaagccaataggaccgtgtatttaaatgtatctcgaactaatggcattgatttggctgtgagtgtgcagtgggagacagtatctgaaacagcctttggcatgaggggaatggatgttgtgttttccgtatttcaaagttttttggatgaatcagcttctggctggtgtttctttactttggaaaatttaatatatggtataatgttaagaaaatcatctgttactgtttaccgatggcaggggatttttattccagttgaggatttaaatatagaaaatcctaaaacttgtgaggcctttaatattggtttttctccctactttgtgattactcatgaagaaagaaatgaagaaaagccttctcttaacagtgtgtttacattcacatctggatttaaattattcctggtacaaacaatcattattctggaaagttctcaagtaagatattttacttcagacagccaagattatttaatcattgcaagtcaaagagatgattccgaattaactcaggtcttcaggtggaatggaggaagcttcgtgttgcatcaaaaactccctgtccgaggtgtgctgaccgtggccttgttcaacaagggaggctctgtgttcttagccatttcccaggctaatgccaggctaaactcccttttattcagatggtctggcagtgggtttattaactttcaagaggtgcctgtcagtgggacaacagaagttgaggctttgtcttcagccaatgatatttacctaatatttgccgaaaatgtctttctaggagatcagaattcaattgatattttcatctgggagatgggacagtcttccttcaggtattttcagtctgtagattttgctgctgttaacagaatccactccttcacaccagcctcaggaatagcccacatacttcttattggccaagatatgtctgctctttactgctggaattcggagcgtaatcaattctcttttgttctggaagtaccttctgcttatgatgtggcttctgttacagtaaagtcccttaattcaagcaagaatttaatagctctagtgggagctcattcacatatatatgagctagcctacatttccagccattctgactttattcctagttcaggtgaactgatatttgaacctggtgagagagaagctacaatagcagtaaatatccttgatgatacagttccagaaaaagaagaatccttcaaagttcaacttaaaaatcccaaaggaggagcagagattggcattaatgattctgtaacaataaccattctgtctaatgatgatgcctatggaattgttgcatttgctcagaattcattatataagcaagtggaagaaatggagcaagatagcctagtaaccttgaacgttgaacgcttaaaaggaacatatggccgtataaccatagcatgggaagctgatggaagtattagtgatatatttcctacctcaggagtgattttatttactgaaggccaggtactgtcaacaatcactctaactattcttgctgataatataccagagttatcagaggttgtgattgtaaccctcacccgtatcaccacagaaggggttgaggactcatacaaaggtgctactattgatcaggacagaagcaagtctgttataacaactttgcccaatgactcaccttttggcttggtgggctggcgtgctgcgtctgtcttcattagagtagcagagcctaaagaaaacaccaccactcttcagttacaaatagctcgagataaaggactacttggggatattgccattcacttgagagctcaacccaatttcttactgcatgtcgataatcaagctactgagaatgaagattatgtattgcaagaaacaataataataatgaaagaaaacataaaagaagctcatgccgaagtttccattttgccggatgaccttcctgaattggaggaaggatttattgtcactatcactgaggtgaacctggtgaactctgacttctctacaggacagccaagtgtgcggaggcccggaatggaaatagctgagataatgatagaagaaaatgacgatcccagaggaatttttatgtttcatgttactagaggcgctggggaagttattactgcctatgaggtgcctccacccttgaacgttcttcaagttcctgtagtccggctggctggaagctttggggcagtaaatgtttattggaaagcatcaccagacagtgctggcctggaagactttaaaccatctcatgggattcttgaatttgcagataaacaggttactgcaatgatagaaatcaccataattgatgatgctgaatttgaattgacagagacgttcaatatttccttgatcagtgttgctggaggtggcagacttggtgatgatgttgtggtaactgttgttattccacaaaatgattctccatttggagtatttggatttgaagaaaagactgtaatgattgatgaatccctttcatccgatgaccctgattcatatgtgacattgacggttgtccggtccccaggaggaaaaggaaccgtccgacttgagtggaccatagatgagaaggctaaacataaccttagtcctttgaatgggacccttcattttgatgagactgagtcccagaagaccattgtgttgcacacacttcaagacacagtgttggaggaggacaggcgtttcaccattcagctgatatcaattgatgaggtagaaatatctccagtaaaaggtagtgcatcaataattattcggggtgataagcgagcatcaggagaagttgggatagctccgtcatctaggcacatcctcattggggaaccctcagcaaaatataatggtaccgctattatcagccttgttcgaggcccagggattttgggggaggtcacagtgttctggaggatattccctccttccgtgggggaatttgctgaaacatcaggaaaactgacaatgcgagacgaacagtctgcagtcattgtagtaatacaggctttgaacgatgacattcccgaggaaaaaagcttctatgagtttcagctcactgcagtcagtgagggaggagttctgagtgaatccagcagcactgccaacatcacggtggtggccagcgactctccctatggccgatttgccttttcacatgagcaacttcgagtgtcagaagcacagagggttaacatcacaatcatccgttccagtggagattttggccatgtgcgactctggtacaagacgatgagcgggacagcggaagcaggcttggattttgttcctgcagcaggggagctcctctttgaagcaggggagatgaggaaaagtctgcatgttgaaatccttgatgatgactatcctgaaggcccagaggaattttctctaacaattacaaaggtggaactccagggaagagggtatgattttaccattcaagaaaatggacttcagatagatcaacctcctgaaataggaaacatctccattgttcgcatcataataatgaaaaatgataacgcagaaggcatcattgaatttgacccaaagtatactgccttcgaagtggaggaagatgttgggctgatcatgatcccagtggtgaggctacatggaacttatggctatgtgacagctgatttcatctctcagagctcctctgccagtcccggaggtgttgattacattttgcatggcagtacagtcacctttcagcatgggcaaaacttaagttttataaatatctccatcattgatgacaatgaaagtgaatttgaggagcccattgaaattctactcactggagctactggaggagcggtccttgggcgccacctagtgagcagaatcataatagctaagagtgactctccctttggagttataaggtttctcaatcaaagcaaaatttctattgctaatcccaattccacaatgattttatcactggtgctggagcggactggaggactcttgggagagattcaggtgaactgggagacagtaggacccaactctcaagaagccttactgccacagaatagagacattgcagacccagtgagcgggttgttctattttggagaaggagaaggaggagtgagaaccataattctgacaatctatcctcatgaagaaattgaagttgaagagacattcattattaaacttcatcttgtgaaaggagaagctaaattagactccagagctaaagatgttacattaaccatacaagagtttggtgacccaaatggagttgttcagtttgctcctgaaactttgtctaagaagacttattcagagcctctggctctggaagggcccctgctcattaccttctttgtcagaagagtcaagggcacctttggagagattatggtttactgggaattaagtagtgagtttgacattactgaagactttctttccaccagtggatttttcaccattgctgatggagagagtgaagctagctttgatgttcatttgctaccagatgaggtacctgagatagaggaagattatgtgatccagcttgtttctgtagagggaggagccgaactggatctggagaagagtatcacatggttctctgtttatgcaaatgatgacccacatggagtatttgccctgtattcggatcgccagtcaatacttattgggcagaaccttattagatccatccaaattaacataacccggcttgctggaacatttggagatgtggctgttgggcttcgaatatcatcggatcataaagaacagccgattgttaccgaaaatgcagagaggcagctggtggtcaaagatggtgccacatataaagtggacgtggtgccaataaagaatcaggtcttcctatcactgggctctaatttcactttgcaactggtgactgtgatgcttgtcggtggacgtttctatggaatgccaacaattcttcaggaagcaaaatctgctgtccttccagtctctgagaaagctgccaattctcaggtcggatttgaatccactgcttttcaactcatgaacatcactgctggcacaagccacgttatgatttctaggagaggcacatatggagctctctcggttgcctggaccactggatatgctcctgggttagaaattcctgaattcattgttgttggcaacatgaccccaacactggggagcctttcattttcccacggtgaacaaaggaaaggagttttcctgtggacgtttcctagccctggttggccagaggcctttgttcttcacctatcaggagtgcagagcagtgctcctggcggagctcaactccgatcaggtttcattgttgctgaaattgaaccaatgggcgtcttccaattttccactagctcaagaaatatcatagtgtcagaagatacacagatgatcagattacatgtacaaagactatttgggttccacagcgatcttattaaagtttcttatcagaccactgcaggaagcgccaagccactggaagattttgagcctgttcagaatggggaactgttttttcaaaaattccaaactgaggttgattttgaaataaccattattaatgatcagctttctgagatagaagaatttttttacattaaccttacttcagtagaaattaggggattacaaaagtttgatgttaattggagcccacgcctgaatctagatttcagtgttgcagtgattacaatattggataatgatgacctggcaggaatggatatttccttccccgagacaactgtggctgtagcagttgacacaactctcattcctgtagaaactgaatccaccacatacctcagcacaagcaagacgactaccattctgcagccaaccaacgtggttgccattgttactgaggcaactggtgtatctgccatccctgagaaacttgtcacccttcatggcacacctgctgtgtctgaaaagcctgatgtggccactgtaactgccaatgtttccattcatggaacattcagccttgggccatccattgtttatattgaagaggagatgaagaatggcacattcaacactgcagaagttcttatccgaagaactggtgggtttactggcaatgtcagcataacagttaaaactttcggtgaaagatgtgctcagatggaaccaaatgcattgccctttcgtggtatctatgggatttccaacctaacatgggcagttgaagaagaagactttgaagaacaaactcttacccttatattcctagatggagaaagagaacgtaaagtatcagttcaaattttggatgatgatgagcctgaggggcaggaattcttctacgtgtttctcacaaaccctcaagggggagcacagattgtggaggagaaggatgatactggatttgcagcttttgccatggttattattacagggagtgaccttcacaatggcatcataggattcagtgaggagtcccagagtggactagaactcagggaaggagctgttatgagaagattgcaccttattgtcacaagacagccaaacagggcctttgaagatgtcaaggtcttttggcgagtcacacttaacaaaacagtcgtcgtgctccagaaggatggggtaaacctggtggaggaacttcagtctgtgtcagggaccacaacctgtacaatgggtcaaacaaaatgctttatcagcattgaactcaaaccagaaaaggtaccacaggttgaagtgtatttttttgtggaactatatgaagctactgctggagcagcaataaacaacagtgccagattcgcacagattaaaatcttagaaagtgatgaatctcaaagccttgtgtatttttctgtgggttctcggctggcagtggctcacaagaaggccactttaatcagtctgcaggtggccagagattctgggacaggactaatgatgtctgttaactttagtacccaggagttgaggagtgctgaaacaattggtcgtaccatcatatctccagctatttctggaaaggattttgtgataactgaaggcacattggtctttgaacctggccagagaagcactgtattggatgtcatcctaacgccagagacaggatctttaaattcatttcctaaacgcttccagattgtcctttttgacccaaaaggtggtgccagaattgataaagtgtatgggactgccaacatcactcttgtctcagatgcagattcgcaggccatttgggggcttgcagatcagctacatcagcctgtgaatgatgatattctcaacagagtgctccataccatcagcatgaaagtggccacagaaaacacagatgaacaactcagtgccatgatgcatttaatagaaaagataactactgaaggaaaaattcaagctttcagtgttgccagccgaactcttttctatgagattctttgttctcttattaacccaaagcgcaaggacactaggggattcagtcactttgctgaagtgactgagaattttgccttttctctgctgactaatgttacttgcggctctcctggtgaaaaaagcaaaaccatccttgatagttgcccatatttgtcaatattggctcttcactggtatcctcagcaaatcaatggacacaagtttgaaggaaaggaaggagattacattcgaattccagagaggctactggatgtccaggatgcagaaataatggctgggaaaagtacatgtaaattagtccagtttacagagtatagcagccaacagtggtttataagtggaaacaatcttcctaccctaaaaaataaggtattatctttgagtgtgaaaggtcagagttcacaactcctgactaatgacaatgaggttctctacaggatttatgctgctgagcctagaattattcctcagacatctctgtgtctcctttggaatcaggctgctgcaagctggttgtctgacagtcagttttgcaaagtggttgaggaaactgcagactatgtggaatgtgcctgttcacacatgtctgtgtatgctgtctatgctcggactgacaacttgtcttcatacaatgaagccttcttcacttctggatttatatgtatctcaggtctttgcttggctgttctttcccatatcttctgtgccaggtactccatgtttgcagctaaacttctgactcacatgatggcagccagcttaggtacacagattctgtttctggcgtctgcatacgcaagtccccaactcgctgaggagagctgttcagctatggctgctgtcacacattacctgtatctttgccagtttagctggatgctcattcagtctgtgaatttctggtacgtgctggtgatgaatgatgagcacacagagaggcgatatctgctgtttttccttctgagttggggactaccagcttttgtggtgattctcctcatagttattttgaaaggaatctatcatcagagcatgtcacagatctatggactcattcatggtgacctgtgttttattccaaacgtctatgctgctttgttcactgcagctcttgttcctttgacgtgcctcgtggtggtgttcgtggtgttcatccatgcctaccaggtgaagccacagtggaaagcatatgatgatgtcttcagaggaaggacaaatgctgcagaaattccactgattttatatctctttgctctgatttccgtgacatggctttggggaggactacacatggcctacagacacttctggatgttggttctctttgtcattttcaacagtctgcagggactttatgttttcatggtttatttcattttacacaaccaaatgtgttgccctatgaaggccagttacactgtggaaatgaatgggcatcctggacccagcacagcctttttcacgcccgggagtggaatgcctcctgctggaggggaaatcagcaagtccacccagaatctcatcggtgctatggaggaggtgccacctgactgggagagagcatccttccaacagggcagtcaggccagccctgatttaaagccaagtccacaaaatggagccacgttcccgtcctctggaggatatggccaggggtcactgatagccgatgaggagtcccaggagtttgatgatttaatatttgcattaaaaactggtgctggtctcagtgtcagtgataatgaatctggtcaaggcagccaggaggggggcaccttgactgactcccagatcgtggagctcaggaggatacccatcgccgacactcacctgtag

SEQ ID NO: 964 - DNA, 570 bp, Homo Sapiens
atgtccagggttccagggcccggtggcctgggagctgctttctccccactggctgggctgcatctggccctggctggaggccttgctttgaggggctgtgaccctcttcccccaggccctccccagccgacgacagccaccggagaggagatcggaacacgattgtctcagatgcagggcgctgtgcgggacgaagccgcaaggactctcgtatcgggcccttgggactcgggaggtgccagaggcggcggctgctctggacctcggtgttcactgacctttgtttcacttgcctctgctcgactccgagagcaggaaacccggccgtggcctggcagctccgcctcccatgcccgcacgctggggtctgtcttgtctggagcagtggggcacaccccggaggaggcgggggtcagggctgtcggccttggccccctgctggtcgctgtttcggggactcggggcggccagtaccaccgcctgaggcggggctcagcagcgttgcatgtacgggcctcgtactgcctcatggaaaatcctccggagccgccctccattgtgggttcctga

SEQ ID NO: 965 - DNA, 333 bp, Homo Sapiens
atggctgcttcatcatcatcctcctcagctggtggggtcagtggaagttctgtcactggatctggtttcagtgtctcagaccttgccccaccacggaaagcccttttcacctaccccaaaggagctggagagatgttagaagatggctctgagagattcctctgcgaatctgtttttagctatcaagtggcatccacgcttaaacaggtgaaacatgatcagcaagttgctcggatggaaaaactagctggtttggtagaagagctggaggctgacgagtggcggtttaagcccatcgagcagctgctgggattcaccccctcttcaggttga

SEQ ID NO: 966 - DNA, 999 bp, Homo Sapiens
atggcaactctaaaggatcagctgatttataatcttctaaaggaagaacagaccccccagaataagattacagttgttggggttggtgctgttggcatggcctgtgccatcagtatcttaatgaaggacttggcagatgaacttgctcttgttgatgtcatcgaagacaaattgaagggagagatgatggatctccaacatggcagccttttccttagaacaccaaagattgtctctggcaaagactataatgtaactgcaaactccaagctggtcattatcacggctggggcacgtcagcaagagggagaaagccgtcttaatttggtccagcgtaacgtgaacatctttaaattcatcattcctaatgttgtaaaatacagcccgaactgcaagttgcttattgtttcaaatccagtggatatcttgacctacgtggcttggaagataagtggttttcccaaaaaccgtgttattggaagcggttgcaatctggattcagcccgattccgttacctaatgggggaaaggctgggagttcacccattaagctgtcatgggtgggtccttggggaacatggagattccagtgtgcctgtatggagtggaatgaatgttgctggtgtctctctgaagactctgcacccagatttagggactgataaagataaggaacagtggaaagaggttcacaagcaggtggttgagagtgcttatgaggtgatcaaactcaaaggctacacatcctgggctattggactctctgtagcagatttggcagagagtataatgaagaatcttaggcgggtgcacccagtttccaccatgattaagggtctttacggaataaaggatgatgtcttccttagtgttccttgcattttgggacagaatggaatctcagaccttgtgaaggtgactctgacttctgaggaagaggcccgtttgaagaagagtgcagatacactttgggggatccaaaaggagctgcaattttaa

SEQ ID NO: 967 - DNA, 1074 bp, Homo Sapiens
atggcgccgcggagggtcaggtcgtttctgcgcgggctcccggcgctgctactgctgctgctcttcctcgggccctggcccgctgcgagccacggcggcaagtactcgcgggagaagaaccagcccaagccgtccccgaaacgcgagtccggagaggagttccgcatggagaagttgaaccagctgtgggagaaggcccagcgactgcatcttcctcccgtgaggctggccgagctccacgctgatctgaagatacaggagagggacgaactcgcctggaagaaactaaagcttgacggcttggacgaagatggggagaaggaagcgagactcatacgcaacctcaatgtcatcttggccaagtatggtctggacggaaagaaggacgctcggcaggtgaccagcaactccctcagtggcacccaggaagacgggctggatgaccccaggctggaaaagctgtggcacaaggcgaagacctctgggaaattctccggcgaagaactggacaagctctggcgggagttcctgcatcacaaagagaaagttcacgagtacaacgtcctgctggagaccctgagcaggaccgaagaaatccacgagaacgtcattagcccctcggacctgagcgacatcaagggcagcgtcctgcacagcaggcacacggagctgaaggagaagctgcgcagcatcaaccagggcctggaccgcctgcgcagggtcagccaccagggctacagcactgaggctgagttcgaggagcccagggtgattgacctgtgggacctggcgcagtccgccaacctcacggacaaggagctggaggcgttccgggaggagctcaagcacttcgaagccaaaatcgagaagcacaaccactaccagaagcagctggagattgcgcacgagaagctgaggcacgcagagagcgtgggcgacggcgagcgtgtgagccgcagccgcgagaagcacgccctgctggaggggcggaccaaggagctgggctacacggtgaagaagcatctgcaggacctgtccggcaggatctccagagctcggcacaacgaactctga

SEQ ID NO: 968 - DNA, 2427 bp, Homo Sapiens
atggcgggtaccgtggtgctggacgatgtggagctgcgggaggctcagagagattacctggacttcctggacgacgaggaagaccagggaatttatcagagcaaagttcgggagctgatcagtgacaaccaataccggctgattgtcaatgtgaatgacctgcgcaggaaaaacgagaagagggctaaccggcttctgaacaatgcctttgaggagctggttgccttccagcgggccttaaaggattttgtggcctccattgatgctacctatgccaagcagtatgaggagttctacgtaggactggaaggcagctttggctccaagcacgtctccccgcggactcttacctcctgcttcctcagctgtgtggtctgtgtggagggcattgtcactaaatgttctctagttcgtcccaaagtcgtccgcagtgtccactactgtcctgctactaagaagaccatagagcgacgttattctgatctcaccaccctggtggcctttccctccagctctgtctatcctaccaaggatgaggagaacaatccccttgagacagaatatggcctttctgtctacaaggatcaccagaccatcaccatccaggagatgccggagaaggccccagccggccagctcccccgctctgtggacgtcattctggatgatgacttggtggataaagcgaagcctggtgaccgggttcaggtggtgggaacctaccgttgccttcctggaaagaagggaggctacacctctgggaccttcaggactgtcctgattgcctgtaatgttaagcagatgagcaaggatgctcagccctctttctctgctgaggatatagccaagatcaagaagttcagtaaaacccgatccaaggatatctttgaccagctggccaagtcattggccccaagtatccatgggcatgactatgtcaagaaagcaatcctctgcttgctcttgggaggggtggaacgagacctagaaaatggcagccacatccgtggggacatcaatattcttctaataggagacccatccgttgccaagtctcagcttctgcggtatgtgctttgcactgcaccccgagctatccccaccactggccggggctcctctggagtgggtctgacggctgctgtcaccacagaccaggaaacaggagagcgccgtctggaagcaggggccatggtcctggctgaccgaggcgtggtttgcattgatgaatttgacaaaatgtctgacatggatcgcacagccatccatgaagtgatggagcagggtcgagtgaccattgccaaggctggcatccatgctcggctgaatgcccgctgcagtgttttggcagctgccaaccctgtctacggcaggtatgaccagtataagactccaatggagaacattgggctacaggactcactgctgtcacgatttgacttgctcttcatcatgctggatcagatggatcctgagcaggatcgggagatctcagaccatgtccttcggatgcaccgttacagagcacctggggagcaggatggcgatgctatgcccttgggtagtgctgtggatatcctggccacagatgatcccaactttagccaggaagatcagcaggacacccagatttatgagaagcatgacaaccttctacatgggaccaagaagaaaaaggagaagatggtgagtgcagcattcatgaagaagtacatccatgtggccaaaatcatcaagcctgtcctgacacaggagtcggccacctacattgcagaagagtattcacgcctgcgcagccaggatagcatgagctcagacaccgccaggacatctccagttacagcccgaacactggaaactctgattcgactggccacagcccatgcgaaggcccgcatgagcaagactgtggacctgcaggatgcagaggaagctgtggagttggtccagtatgcttactttaagaaggttctggagaaggagaagaaacgtaagaagcgaagtgaggatgaatcagagacagaagatgaagaggagaaaagccaagaggaccaggagcagaagaggaagagaaggaagactcgccagccagatgccaaagatggggattcatacgacccctatgacttcagtgacacagaggaggaaatgcctcaagtacacactccaaagacggcagactcacaggagaccaaggaatcccagaaagtggagttgagtgaatccaggttgaaggcattcaaggtggccctcttggatgtgttccgggaagctcatgcgcagtcaatcggcatgaatcgcctcacagaatccatcaaccgggacagcgaagagcccttctcttcagttgagatccaggctgctctgagcaagatgcaggatgacaatcaggtcatggtgtctgagggcatcatcttcctcatctga

SEQ ID NO: 969 - DNA, 1260 bp, Homo Sapiens
atgcggggaacccaggtccacagcgtcgcagggccctcgcaatggcttgggaaaccgctgaccacacggctcctattcccagcagccccgtgctgctgtcgcccacactacctcttccttgcggcttccggcccccgcagcctcagtacctctgctatctcttttgcagaagtccaggttcaggcccctcctgttgttgctgcaactccctcacccacagcagtacctgaggtggcttctggagagactgcagatgtagtccaaactgctgcagagcagagcttcgctgaactggggctggggtcatacaccccagtgggactgatccagaatttactggaatttatgcatgttgatctgggcctaccttggtggggggccattgctgcatgtacagtctttgcccgctgcctgatttttcctctcatcgtgacgggccagcgagaggcagccaggatccacaatcacttgccagagatccagaagttttccagtcgaatcagagaggccaagttagcaggagaccatattgagtattacaaggcttcctcggagatggcactttaccagaaaaaacatggtattaaactctataaacctctcattctccctgtgactcaggccccaatcttcatctccttcttcattgctttgagagagatggccaaccttcctgtgcccagcctgcagacaggtggcctctggtggttccaggatctcacggtatccgatcccatctacatattaccactggcagtcactgctacaatgtgggctgttcttgagctaggtgctgagacaggtgtgcaaagttctgaccttcagtggatgagaaatgtcatcagaatgatgcccctgataaccttgcccataaccatgcatttccccacggcagtgtttatgtactggctctcctccaatttgttttccctggtccaagtatcctgtctccggattccagcagtacgcactgtacttaaaatcccccagcgtgttgtacatgacctggacaaattacctccacgggaaggcttcctagagagcttcaaaaaaggctggaaaaatgctgaaatgacgcgtcagctgcgagagcgtgaacaacgcatgcggaatcagttggagctagcagccaggggtcctttacgacagacctttacccacaaccctctcctacaacctggaaaggataaccctcccaatatccctagcagcagcagcaaaccaaagtcaaagtatccctggcacgacacacttggctga

SEQ ID NO: 970 - DNA, 3876 bp, Homo Sapiens
atggcgggcgccgcgtccccttgcgccaacggctgcgggcccggcgcgccctcggacgccgaggtgctgcacctctgccgcagcctcgaggtgggcaccgtcatgactttgttctactccaagaagtcgcagcgacccgagcggaagaccttccaggtcaagctggagacgcgccagatcacgtggagccggggcgccgacaagatcgagggggccattgacattcgtgaaattaaggagatccgcccagggaagacctcacgggactttgatcgctatcaagaggacccagctttccggccggaccagtcacattgctttgtcattctctatggaatggaatttcgcctgaaaacgctgagcctgcaagccacatctgaggatgaagtgaacatgtggatcaagggcttaacttggctgatggaggatacattgcaggcacccacacccctgcagattgagaggtggctccggaagcagttttactcagtggatcggaatcgtgaggatcgtatatcagccaaggacctgaagaacatgctgtcccaggtcaactaccgggtccccaacatgcgcttcctccgagagcggctgacggacctggagcagcgcagcggggacatcacctacgggcagtttgctcagctgtaccgcagcctcatgtacagcgcccagaagacgatggacctccccttcttggaagccagtactctgagggctggggagcggccggagctttgccgagtgtcccttcctgagttccagcagttccttcttgactaccagggggagctgtgggctgttgatcgcctccaggtgcaggagttcatgctcagcttcctccgagaccccttacgagagatcgaggagccatacttcttcctggatgagtttgtcaccttcctgttctccaaagagaacagtgtgtggaactcgcagctggatgcagtatgcccggacaccatgaacaaccctctttcccactactggatctcctcctcgcacaacacgtacctgaccggggaccagttctccagtgagtcctccttggaagcctatgctcgctgcctgcggatgggctgtcgctgcattgagttggactgctgggacggcccggatgggatgccagttatttaccatgggcacacccttaccaccaagatcaagttctcagatgtcctgcacaccatcaaggagcatgcctttgtggcctcagagtacccagtcatcctgtccattgaggaccactgcagcattgcccagcagagaaacatggcccaatacttcaagaaggtgctgggggacacactcctcaccaagcccgtggagatctctgccgacgggctcccctcacccaaccagcttaagaggaagatcctcatcaagcacaagaagctggctgagggcagtgcctacgaggaggtgcctacatccatgatgtactctgagaacgacatcagcaactctatcaagaatggcatcctctacctggaggaccctgtgaaccacgaatggtatccccactactttgttctgaccagcagcaagatctactactctgaggagaccagcagtgaccagggcaacgaggatgaggaggagcccaaggaggtcagcagcagcacagagctgcactccaatgagaagtggttccatgggaagctaggggcagggcgtgacgggcgtcacatcgctgagcgcctgcttactgagtactgcatcgagaccggagcccctgacggctccttcctcgtgcgagagagtgagaccttcgtgggcgactacacgctctctttctggcggaacgggaaagtccagcactgccgtatccactcccggcaagatgctgggacccccaagttcttcttgacagacaacctcgtctttgactccctctatgacctcatcacgcactaccagcaggtgcccctgcgctgtaatgagtttgagatgcgactttcagagcctgtcccacagaccaacgcccacgagagcaaagagtggtaccacgcgagcctgaccagagcacaggctgagcacatgctaatgcgcgtccctcgtgatggggccttcctggtgcggaagcggaatgaacccaactcatatgccatctctttccgggctgagggcaagatcaagcattgccgtgtccagcaagagggccagacagtgatgctagggaactcggagttcgacagccttgttgacctcatcagctactatgagaaacacccgctataccgcaagatgaagctgcgctatcccatcaacgaggaggcactggagaagattggcacagctgagcctgactacggggccctgtatgagggacgcaaccctggcttctatgtagaggcaaaccctatgccaactttcaagtgtgcagtcaaagccctctttgactacaaggcccagagggaggacgagctgaccttcatcaagagcgccatcatccagaatgtggagaagcaagagggaggctggtggcgaggggactacggagggaagaagcagctgtggttcccatcaaactacgtggaagagatggtcaaccccgtggccctggagccggagagggagcacttggacgagaacagccccctaggggacttgctgcggggggtcttggatgtgccggcttgtcagattgccatccgtcctgagggcaagaacaaccggctcttcgtcttctccatcagcatggcgtcggtggcccactggtccctggatgttgctgccgactcacaggaggagctgcaggactgggtgaaaaagatccgtgaagtggcccagacagcagacgccaggctcactgaagggaagataatggaacggaggaagaagattgccctggagctctctgaacttgtcgtctactgccggcctgttccctttgatgaagagaagattggcacagaacgtgcttgctaccgggacatgtcatccttcccggaaaccaaggctgagaaatacgtgaacaaggccaaaggcaagaagttccttcagtacaatcgactgcagctctcccgcatctaccccaagggccagcgactggattcctccaactacgatcctttgcccatgtggatctgtggcagtcagcttgtggccctcaacttccagacccctgacaagcctatgcagatgaaccaggccctcttcatgacgggcaggcactgtggctacgtgctgcagccaagcaccatgcgggatgaggccttcgacccctttgacaagagcagcctccgcgggctggagccatgtgccatctctattgaggtgctgggggcccgacatctgccaaagaatggccgaggcattgtgtgtccttttgtggagattgaggtggctggagctgagtatgacagcaccaagcagaagacagagtttgtggtggacaatggactcaaccctgtatggccagccaagcccttccacttccagatcagtaaccctgaatttgcctttctgcgcttcgtggtgtatgaggaagacatgtttagtgaccagaatttcctggctcaggctactttcccagtaaaaggcctgaagacaggatacagagcagtgcctttgaagaacaactacagtgaggacctggagttggcctccctgctgatcaagattgacattttccctgccaagcaggagaatggtgacctcagtcccttcagtggtacgtccctgcgggagcggggctcagatgcctcaggccagctgtttcatggccgagcccgggaaggctcctttgaatcccgctaccagcagccgtttgaggacttccgcatctcccaggagcatctcgcagaccattttgacagtcgagaacgaagggccccaagaaggactcgggtcaatggagacaaccgcctctag

SEQ ID NO: 971 - DNA, 1656 bp, Homo Sapiens
atggacgaactgttccccctcatcttcccggcagagccagcccaggcctctggcccctatgtggagatcattgagcagcccaagcagcggggcatgcgcttccgctacaagtgcgaggggcgctccgcgggcagcatcccaggcgagaggagcacagataccaccaagacccaccccaccatcaagatcaatggctacacaggaccagggacagtgcgcatctccctggtcaccaaggaccctcctcaccggcctcacccccacgagcttgtaggaaaggactgccgggatggcttctatgaggctgagctctgcccggaccgctgcatccacagtttccagaacctgggaatccagtgtgtgaagaagcgggacctggagcaggctatcagtcagcgcatccagaccaacaacaaccccttccaagttcctatagaagagcagcgtggggactacgacctgaatgctgtgcggctctgcttccaggtgacagtgcgggacccatcaggcaggcccctccgcctgccgcctgtcctttctcatcccatctttgacaatcgtgcccccaacactgccgagctcaagatctgccgagtgaaccgaaactctggcagctgcctcggtggggatgagatcttcctactgtgtgacaaggtgcagaaagaggacattgaggtgtatttcacgggaccaggctgggaggcccgaggctccttttcgcaagctgatgtgcaccgacaagtggccattgtgttccggacccctccctacgcagaccccagcctgcaggctcctgtgcgtgtctccatgcagctgcggcggccttccgaccgggagctcagtgagcccatggaattccagtacctgccagatacagacgatcgtcaccggattgaggagaaacgtaaaaggacatatgagaccttcaagagcatcatgaagaagagtcctttcagcggacccaccgacccccggcctccacctcgacgcattgctgtgccttcccgcagctcagcttctgtccccaagccagcaccccagccctatccctttacgtcatccctgagcaccatcaactatgatgagtttcccaccatggtgtttccttctgggcagatcagccaggcctcggccttggccccggcccctccccaagtcctgccccaggctccagcccctgcccctgctccagccatggtatcagctctggcccaggccccagcccctgtcccagtcctagccccaggccctcctcaggctgtggccccacctgcccccaagcccacccaggctggggaaggaacgctgtcagaggccctgctgcagctgcagtttgatgatgaagacctgggggccttgcttggcaacagcacagacccagctgtgttcacagacctggcatccgtcgacaactccgagtttcagcagctgctgaaccagggcatacctgtggccccccacacaactgagcccatgctgatggagtaccctgaggctataactcgcctagtgacaggggcccagaggccccccgacccagctcctgctccactgggggccccggggctccccaatggcctcctttcaggagatgaagacttctcctccattgcggacatggacttctcagccctgctgagtcagatcagctcctaa

SEQ ID NO: 972 - DNA, 6078 bp, Homo Sapiens
atggacaattttgctgagggagatttcactgtggcggattatgccttgttagaagattgccctcacgtggatgattgtgtctttgctgctgaatttatgagcaatgattatgttcgtgtgactcagctttactgtgatggggtgggtgtgcaatataaagattatatccaaagtgagaggaatttggaatttgacatctgcagtatatggtgtagtaaaccaatttctgtcctgcaagattattgcgatgccattaaaataaacatcttctggccacttctgtttcaacatcaaaacagttccgtaatatcacgattgcatccctgtgtggacgccaacaattcacgtgcttctgagataaatttgaagaaactacaacatcttgagttgatggaagatattgtggatttggcaaagaaagttgctaatgattcattccttattggaggcttattgagaattggttgtaaaatagaaaataaaatcttggcaatggaagaagctctgaattggataaaatatgcaggcgatgtaacaattctaactaaattaggatcaattgacaattgttggcctatgttaagtattttctttactgaatacaagtaccacataactaaaattgtaatggaagactgcaatttgcttgaagaacttaaaactcaaagttgtatggattgtatagaggaaggagaactaatgaaaatgaaaggaaatgaagagttttccaaagaaagatttgatatagctattatctattacaccagagccattgaatatagacctgaaaactaccttctttatggtaaccgagctctttgttttcttcgtactggacagtttagaaatgcactcggtgatggaaagagagccactattctgaagaacacttggccaaagggtcattatcgttattgtgatgctctttctatgctgggggaatatgactgggccctgcaagcaaacataaaagctcaaaaactctgtaaaaatgaccctgagggaatcaaggatctaattcagcagcatgtaaagttacaaaaacaaatagaagacctacaaggtcgaacagcaaataaggatccaattaaagccttttatgaaaacagggcctacacacctaggagtttatcagcacctatatttactacttcacttaactttgtggagaaggaaagagatttcagaaaaattaatcacgaaatggccaacggtggtaatcagaatctaaaggtggcggatgaggcgttgaaggtagatgattgtgactgtcatcctgaattttcaccaccatcaagtcagcctccaaaacataaaggaaaacaaaaatctcgaaacaatgaatcagaaaagttcagttctagttcaccattgactttaccagcagatttgaagaacatcttggagaaacagttttctaaatcttccagagctgcacaccaggattttgctaatataatgaaaatgctgagaagcttaattcaagatggctatatggccttattggagcagcgttgccgcagcgctgcacaggcctttacagagttgctgaacggtttagatcctcaaaaaataaagcaattgaacctggccatgattaactatgttttggtcgtctatggacttgccatttctctccttggaataggacagcctgaggaattatctgaagccgaaaaccagtttaagaggattattgaacactaccccagtgagggccttgattgcttggcctactgtggaattggaaaagtatatttgaaaaaaaacagatttctagaagctctcaatcactttgagaaagcaagaaccttgatttatcgtcttcctggagtgttaacttggcccacgagtaatgtgattattgaagagtctcagccacaaaaaataaagatgctgttagagaaatttgttgaagaatgcaagttccctccagtgccagatgccatttgttgctatcagaagtgccatggatattctaagatccagatatacataactgatccagactttaagggttttatacgcatcagctgttgccagtactgtaaaatagaatttcacatgaattgctggaagaagttaaaaactacaacctttaatgataaaattgacaaggattttctacaaggaatatgtcttacccctgactgtgaaggtgtcatttctaagattatcatcttcagcagtggtggtgaagttaaatgtgaatttgaacacaaggtcataaaagaaaaggttcctccaagacctattctgaaacagaaatgttctagcctagagaaactaagactgaaagaagacaaaaaattgaagagaaagatccaaaaaaaagaagcaaaaaagttagcacaagaaagaatggaggaggacttaagagaaagtaatccacccaaaaatgaagagcagaaagaaactgtagacaatgttcagcgttgtcagttccttgatgacagaattctacagtgtataaagcagtatgctgacaagattaaatccggcatacagaatacagccatgcttctcaaagaattgctttcttggaaagttttgagcacagaagactatacaacctgtttttctagcagaaattttctaaatgaagcagtggactatgttattcgccacttgattcaagaaaataacagagtaaagacaagaatatttctgcatgttttgagtgagcttaaagaagtggagcccaaattagccgcctggatccaaaaacttaatagctttggcttagatgccacaggaactttcttttctcgttatggagcatctcttaaactgcttgattttagtatcatgactttcctctggaatgagaaatatggtcacaaactagactctatagaaggaaagcaacttgattatttctctgagccagcatcattgaaggaagcccgttgtttaatatggctgctagaagaacacagagacaagttcccagcattgcatagtgctttagatgaattctttgatataatggacagccgctgtactgtgttaaggaaacaagatagtggtgaagcaccgtttagttcaaccaaggtgaaaaacaaaagcaagaaaaagaagccaaaggattcaaagcctatgttagttgggtctggaacaacttcagtaacttcaaataatgagatcatcacttcaagtgaagaccatagcaatcgaaattcagattctgcaggcccatttgcagtgcctgaccatcttcggcaagatgtagaagaattcgaagctctctatgaccaacacagtaacgaatatgttgtccgcaataagaagctatgggacatgaacccaaaacaaaaatgttcaactctatatgattacttctctcagtttttggaggaacatggtcccttggacatgagtaacaagatgttctctgcagaatatgagtttttcccagaagaaactcgacagatactagaaaaagcaggaggtttaaaaccttttctcttgggatgccctcgttttgttgtgattgacaactgtattgcactgaagaaggttgcatcacggctcaagaaaaaaaggaagaagaaaaacattaaaacaaaagtagaagaaatttcaaaagcaggggagtatgtacgagttaaactacaactgaatccagctgctagggaatttaaaccagatgtaaagtctaaaccagtgtcagattcatcttcagcaccagcttttgaaaatgtgaaacccaaacctgtgtctgcaaattctcccaagccagcttgtgaagatgtgaaggccaaaccagtatccgacaattcttctagacaagtttctgaggatgggcaacccaaaggggtctcttctaattctcctaaaccaggctctgaggatgcaaattacaagcgagtctcctgtaattcccccaaaccggttcttgaggatgtgaaaccaacttattgggctcaatcccatttggtcacaggatactgtacgtatcttcctttccagagatttgatatcacccagacaccgccagcatacataaacgtgttaccaggtttgccccagtacaccagcatatatacacccttggccagcctttctcctgaatatcagctaccaagatcagtaccagtggtgccgtcttttgtagccaatgacagagcagataaaaatgctgctgcctattttgagggtcatcatttgaatgctgagaatgttgctggtcaccagattgcctctgaaacacagatccttgagggctctttgggaatatctgtaaagtcacactgcagcacaggtgatgctcatacagtcctgagtgagtctaacagaaatgatgagcactgtggaaattctaacaacaaatgtgaagtaattccagaaagcaccagtgcagtaacaaacattccacacgtgcagatggttgccatacaggtatcttggaacataatacaccaagaagtcaatactgagccatataatccttttgaggaacgacaaggggaaatttcacggattgaaaaggagcaccaagtattacaagaccaacttcaagaagtgtatgaaaattatgagcagataaaacttaagggcttagaagagaccagggacctggaagagaagttgaaaaggcacttagaagaaaacaagatctcaaagacggaattagattggttccttcaagatttggaaagagaaattaaaaaatggcaacaggaaaaaaaagaaatccaagaaagactaaaatcactgaagaagaaaattaaaaaggtttcaaatgccagtgaaatgtatacccagaaaaatgatggaaaggaaaaggaacatgaattacatctggatcagtcccttgaaatcagcaacacacttacaaatgagaaaatgaaaatagaagagtatataaagaaagggaaagaggattatgaagagagtcatcagagagctgtggctgcagaggtatccgtacttgaaaactggaaggagagtgaagtgtataagctacagatcatggagtcacaagcagaagcctttctgaagaagctggggctgattagccgtgatcctgcagcatatcctgacatggagtctgatatacgttcatgggaattgtttctttctaatgttacaaaagaaattgagaaagcaaagtctcagtttgaagaacaaattaaggcaattaaaaatggttctcggctcagtgaactttctaaagtgcagatttctgagctttcatttcctgcctgtaacacggttcatcccgagttactccctgagtcttcaggcgacgatggccaagggcttgtgacttctgcaagcgacgtgactggaaaccacgcagcacttcacagggatcctagtgtgttctctgctggtgattccccaggggaggctccttctgcgctgttgccagggccaccccctggtcagcctgaagccactcagctgacagggccaaaacgggctggccaggcagctctgtcagaacgaagccctgtggctgatcggaagcagcctgttcctccaggacgtgctgcgcgttcaagccagtctccaaaaaagccgttcaatagtattattgagcacctgtcagtggtattcccatgttacaacagcactgagcttgctggttttattaaaaaagtgcgaagcaaaaacaagaactcactctcaggattgagtattgatgaaattgtccaaagagtgacagaacacattctagatgaacagaaaaagaaaaagccaaacccaggaaaggacaagaggacttatgagcccagctctgccacccccgtgaccaggtcctcccagggctcaccctcggtggttgttgcaccatcacccaaaaccaaggggcagaaagcagaagatgtccctgtgaggattgcactgggtgcaagttcctgtgaaatatgccacgaggtgttcaaatcaaaaaacgtgcgtgtgctcaaatgtgggcacaagtatcacaaagggtgctttaagcagtggcttaaagggcagagcgcttgcccggcctgccagggtcgtgatctcctgacagaagagtcaccttctggaagaggctggcccagtcagaatcaggagctgccttcctgctcttctaggtag

SEQ ID NO: 973 - DNA, 2349 bp, Homo Sapiens
atgaattccgccgagcaaaccgttacgtggctcatcactctgggggtgctggagtcgcccaaaaaaaccatctcggacccggagggctttctgcaggcgtcgctgaaggatggggtggtcctctgcaggctgctggagcgcctgctccccgggaccatcgagaaagtctaccccgagccccggagcgagagcgagtgcctgagcaacatccgcgagttcctgcgcggctgcggggcttccctgcggctggagacgtttgatgcaaatgatttgtatcaggggcagaattttaacaaggtcctcagttccttagtgactctaaataaagtaacagcagacatcgggctggggagtgactccgtgtgtgcccggccctcgtctcaccgcataaagtcttttgactcccttggatcacagtctttgcacactcggacttcaaaactgttccagggccagtatcggagtttggacatgaccgataatagcaacaatcaactggtagtaagagcaaagtttaacttccagcagaccaatgaggacgagctttccttctcaaaaggagacgtcatccatgtcacccgtgtggaagagggaggctggtgggagggcacactcaacggccggaccggctggttccccagcaactacgtgcgcgaggtcaaggccagcgagaagcctgtgtctcccaaatcaggaacactgaagagccctcccaaaggatttgatacgactgccataaacaaaagctattacaatgtggtgctacagaatattttagaaacagaaaatgaatattctaaagaacttcagactgtgctttcaacgtacctacggccattgcagaccagtgagaagttaagttcagcaaacatttcatatttaatgggaaatctagaagaaatatgttctttccagcaaatgctcgtacagtctttagaagaatgcaccaagttgcccgaagctcagcagagagtcggaggctgctttttaaacctgatgccacagatgaaaaccctgtacctcacgtattgtgccaatcacccttctgcagtgaatgtcctcacggaacacagtgaggagttgggggagttcatggagaccaaaggtgccagcagccctgggattctcgtgctgaccacgggcctgagcaaacccttcatgcgcctggataaataccctacgctgctcaaagagctcgagagacacatggaggattatcatacagatagacaagatattcaaaaatccatggctgccttcaaaaacctttcagcccaatgtcaagaagtccggaagaggaaagagcttgagctgcagatcctgacggaagccatccggaactgggagggcgatgacattaaaactctgggcaacgtcacttacatgtcccaggtcctgattcagtgtgccggaagtgaggaaaagaatgaaagatatcttctactcttcccaaatgttttgctaatgttgtctgccagtcctaggatgagtggctttatctatcagggaaagcttccaacgacaggaatgacaatcacaaagcttgaggacagtgaaaatcatagaaatgcatttgaaatatcagggagcatgattgagcggatattagtgtcgtgcaacaaccagcaggatctgcaggaatgggtggagcacctacagaagcaaacgaaggtcacgtctgtgggaaaccccaccataaagcctcattcagtgccatctcataccctcccctcccacccggtcactccgtccagcaagcacgcagacagcaagcccgcgccgctgacgcccgcctaccacacgctgccccacccctcccaccacggcaccccgcacaccaccatcaactggggacccctggagcctccgaaaacacccaagccctggagcctgagctgcctgcggcccgcgcctcccctccggccctcagctgctctctgctacaaggaggatcttagtaagagccctaagaccatgaaaaagctgctgcccaagcgcaaacctgaacggaagccttcagatgaggagttcgcgtcccggaaaagcacagctgctttggaagaagatgctcagattctgaaagtcattgaagcttactgcaccagcgccaaaacaaggcaaacactcaattcaacatggcaaggcactgacctgatgcataatcacgtcttggctgatgatgaccaaccaagcctagactccctggggcgtcgcagtagcctttctcgtttggagccttcagacctctcggaagactctgactatgacagtatatggacagcccatagttacagaatgggttctacatctcgtaagagctgttgctcatatatctctcaccagaactaa

SEQ ID NO: 974 - DNA, 4875 bp, Homo Sapiens
atggccggccagggggactgctgcgtcaaggtggccgtcaggatccggccccagctgtcgaaggagaagattgagggctgtcacatctgtacctctgttaccccgggagagccccaggtcctgctggggaaggacaaggccttcacctatgactttgtcttcgacctggacacctggcaagaacagatctattccacctgtgtgagcaagctcatcgagggctgcttcgagggctataatgccacggtgctggcctatgggcagacgggggccgggaagacgtacaccatgggcactggctttgacatggcaacgtcggaggaggagcagggcatcatcccgagggccatcgcacacctctttgggggcattgccgagcgcaagcgccgggcacaggagcagggcgtggctggacctgagttcaaagtcagcgcccagtttctggagctctacaacgaggagatccttgacctgtttgacagcacccgtgaccctgacacccgccaccgcaggtccaacatcaagatccacgaggacgcaaacggtggcatctacaccactggcgtcacttctcgcctcatccactcccaggaggagctgatccagtgcctgaagcagggggccctgtcccgcaccacagccagcacccagatgaacgtgcagagctcacgctcccacgccatcttcaccatccacctgtgccagatgcgcatgtgcacccagcccgacctggtgaatgaggcggtgactgggcttcctgatggtacacctccctcgagtgagtatgagacactcactgctaagtttcactttgtggacctggccggctcagagcggctgaagcggacaggggctactggcgagcgggccaaggagggcatctccatcaactgtggcctgctggccttgggcaatgtgatcagcgccttaggggaccagagcaagaaggtggtgcacgttccctacagggactccaagctcactcggctcctccaggattcgctggggggcaacagccagaccatcatgatcgcctgtgtgagcccctcagaccgagatttcatggagaccctcaacacactcaaatatgccaatcgggcccgcaacatcaagaacaaggtggtagtgaaccaggacaagaccagccagcaaatcagtgcactgcgggctgagattgctcggctgcagatggagctgatggagtataaggcgggcaagcgagtgataggagaggatggcgctgagggctatagtgatctgttccgagagaatgccatgctacagaaggagaatggggccctgcggctgcgggtgaaagccatgcaggaggccatcgatgccatcaacaaccgcgtcacccagctcatgagccaggaggccaacctgctgctagccaaggccggcgatggcaatgaggccattggtgcgctgatccagaactacatccgggagatcgaggagctacggactaagcttctagagagtgaagccatgaacgagtccctgcgccgcagcctctcacgggcctcggctaggagcccctactccctgggtgcttctccagccgccccggccttcgggggcagccctgccagctccatggaggatgcctcggaggtgatccgcagggccaagcaggacctggagcggctaaagaagaaggaggtcaggcagcggaggaagagccccgagaaggaagccttcaaaaagagggcaaaactccaacaggagaacagcgaggagacggatgagaacgaggcggaggaggaggaggaagagcgagacgagagtggctgtgaggaggaggaagggcgcgaggatgaagatgaggactcgggcagtgaagagagcctggtggactcagactcagaccccgaggagaaggaggtgaacttccaggcggacctggccgacctgacttgtgagatcgaaatcaagcagaagctgatcgacgagctggagaacagccagcggcggttgcagacgctcaagcaccagtatgaggaaaagctgattctgctgcagaacaagatccgagacacacagctggagcgcgaccgtgtgctgcagaacctcagcaccatggagtgctatactgaggagaaggccaacaagatcaaggcagactatgagaagaggctgcgggagatgaaccgggacctgcagaagctgcaggccgcccagaaagagcacgcccggctgcttaagaaccagtcgcgctacgagagggagctgaagaagctacaggccgaggtggctgagatgaagaaggccaaggtggccctgatgaagcagatgcgtgaggagcaacagcggcggcggctagtggagaccaagaggaaccgggagatcgcacagctcaagaaggagcagcggcgacaggagtttcagatccgagctctggagtcccagaagcggcagcaggagatggtcctgaggaggaagacccaggaggtttctgcactgaggcgcctggccaagcccatgtctgagcgggtggcagggcgtgcaggactaaagccacccatgctggactctggggctgaggtgtcggccagcactacctcatctgaggctgaatcaggggcccgctctgtctccagcatcgtgcgccagtggaaccgcaaaatcaaccacttcttgggggaccatcctgcgcccactgtcaatggcacccgtcctgcccgaaagaagttccagaagaagggggccagccagagcttcagtaaggcggcaaggctcaagtggcagtccctggagcgacggatcattgacatcgtcatgcagagaatgaccattgtcaacctggaggctgacatggagcggctcatcaagaaaagggaggagctgttcctcctgcaggaggcactgcggaggaagcgggagcggctgcaggctgagagccccgaggaagagaaggggctgcaggagctggctgaggagatcgaggtgctggcagccaacattgactacatcaatgacggcatcaccgactgccaggccaccatcgtgcagctggaggagaccaaggaggagctggactccacagacacatccgtggtcatcagctcctgctccctggctgaagcccgcctcctgctagacaacttcctcaaggcatccattgacaaggggctgcaagtggcacaaaaggaagcccagatccggctgttggagggccgactgaggcagacggatatggcaggctcctcccagaaccatctgctcctggacgccctgcgtgagaaggctgaagctcaccccgagctgcaggccctcatctacaatgtgcagcaggagaatggctacgccagcacagatgaggagatctcagagttctctgagggcagcttctcccagtcattcaccatgaaaggctccaccagccatgacgatttcaagttcaagagcgagcccaaactgtctgcccaaatgaaagctgtgtcggctgagtgcctgggccccccactggatatctccaccaagaacatcaccaagtccctggcctccctcgttgagatcaaagaggacggagtgggcttctctgtccgagacccctattaccgggacagggtctcgcgcaccgtcagtctgcctacccggggcagcactttccctaggcaatctcgagccacagagacgtccccgctgacgagaaggaagtcctacgaccgagggcagcccattaggtccacagatgtgggattcacacccccatcatcccctcccactcggccccgcaatgaccgcaatgtcttctctcgtctcaccagtaatcagagccaggggtcagcgctggacaagggcatcatctccccggttggaggagccaagggtgcacggacggccccactgcagtgtgtctccatggccgaaggccacaccaagcccatcctctgcctggatgccacagatgagttgctattcacagggtccaaagaccgaagctgcaagatgtggaacttggttacgggacaggagatcgcagctctaaagggccaccccaacaacgtggtctccatcaagtactgcagccactcggggcttgtgttctccgtgtccacctcctacatcaaggtgtgggacatccgggactcagccaagtgcattcggactctcacgtcctcgggccaggtgatctcaggggatgcctgtgccgccacatccacccgtgccatcaccagtgctcagggcgagcatcagatcaaccagatcgccctcagcccttcgggcaccatgctgtacgccgcctcgggcaatgccgtccgcatctgggagcttagcaggttccagcctgtcggcaagctgactggccacatcggccctgtgatgtgcctgacggtcacccagacggccagccagcatgacctcgtggtgactggctccaaggaccactacgttaagatgttcgagctgggcgagtgtgtgacgggcaccatcggccccactcacaacttcgagcccccgcactacgatggcatcgagtgtctcgccatccagggagacatcctgttcagtggctcccgagataacggcatcaagaagtgggacctagaccagcaggagctcatccagcaaatccccaatgcgcacaaggactgggtgtgcgccctggccttcatcccgggccgccccatgctgctcagcgcctgccgtgcgggtgtcatcaaggtctggaacgtggacaacttcacacccatcggtgagatcaagggccacgacagtcccatcaatgccatctgcaccaatgccaagcatatcttcacagcctccagtgactgccgggtaaagttgtggaattacgtccctggactcaccccctgccttcctcgccgagtcctggccataaagggccgcgccaccaccctgccctga

SEQ ID NO: 975 - DNA, 816 bp, Homo Sapiens
atggcggcggaggaacctcagcagcagaagcaggagccgctgggcagcgactccgaaggtgttaactgtctggcctatgatgaagccatcatggctcagcaggaccgaattcagcaagagattgctgtgcagaaccctctggtgtcagagcggctggagctctcggtcctatacaaggagtatgctgaagatgacaacatctatcaacagaagatcaaggacctccacaaaaagtactcgtacatccgcaagaccaggcctgacggcaactgtttctatcgggctttcggattctcccacttggaggcactgctggatgacagcaaggagttgcagcggttcaaggctgtgtctgccaagagcaaggaagacctggtgtcccagggcttcactgaattcacaattgaggatttccacaacacgttcatggacctgattgagcaggtggagaagcagacctctgtcgccgacctgctggcctccttcaatgaccagagcacctccgactaccttgtggtctacctgcggctgctcacctcgggctacctgcagcgcgagagcaagttcttcgagcacttcatcgagggtggacggactgtcaaggagttctgccagcaggaggtggagcccatgtgcaaggagagcgaccacatccacatcattgcgctggcccaggccctcagcgtgtccatccaggtggagtacatggaccgcggcgagggcggcaccaccaatccgcacatcttccctgagggctccgagcccaaggtctaccttctctaccggcctggacactacgatatcctctacaaatag

SEQ ID NO: 976 - DNA, 597 bp, Homo Sapiens
atggcgaccctgtggggaggccttcttcggcttggctccttgctcagcctgtcgtgcctggcgctttccgtgctgctgctggcgcagctgtcagacgccgccaagaatttcgaggatgtcagatgtaaatgtatctgccctccctataaagaaaattctgggcatatttataataagaacatatctcagaaagattgtgattgccttcatgttgtggagcccatgcctgtgcgggggcctgatgtagaagcatactgtctacgctgtgaatgcaaatatgaagaaagaagctctgtcacaatcaaggttaccattataatttatctctccattttgggccttctacttctgtacatggtatatcttactctggttgagcccatactgaagaggcgcctctttggacatgcacagttgatacagagtgatgatgatattggggatcaccagccttttgcaaatgcacacgatgtgctagcccgctcccgcagtcgagccaacgtgctgaacaaggtagaatatgcacagcagcgctggaagcttcaagtccaagagcagcgaaagtctgtctttgaccggcatgttgtcctcagctaa

SEQ ID NO: 977 - DNA, 507 bp, Homo Sapiens
atgctgcccgccgcgctgctccgccgcccgggacttggccgcctcgtccgccacgcccgtgcctatgccgaggccgccgccgccccggctgccgcctctggccccaaccagatgtccttcaccttcgcctctcccacgcaggtgttcttcaacggtgccaacgtccggcaggtggacgtgcccacgctgaccggagccttcggcatcctggcggcccacgtgcccacgctgcaggtcctgcggccggggctggtcgtggtgcatgcagaggacggcaccacctccaaatactttgtgagcagcggttccatcgcagtgaacgccgactcttcggtgcagttgttggccgaagaggccgtgacgctggacatgttggacctgggggcagccaaggcaaacttggagaaggcccaggcggagctggtggggacagctgacgaggccacgcgggcagagatccagatccgaatcgaggccaacgaggccctggtgaaggccctggagtag

SEQ ID NO: 978 - DNA, 1338 bp, Homo Sapiens
atggcccttgtggataagcacaaagtcaagagacagcgattggacagaatttgtgaaggtatccgcccccagatcatgaacggccccctgcacccccgccccctggtggcgctgctggacggccgcgactgcactgtggagatgcccatcctgaaggacctggccactgtggccttctgtgacgcgcagtcgacgcaggaaatccacgagaaggttctaaacgaagccgtgggcgccatgatgtaccacaccatcaccctcaccagggaggacctggagaagttcaaggccctgagagtgatcgtgcggataggcagtggctatgacaacgtggacatcaaggctgccggcgagctcggaattgccgtgtgcaacatcccgtctgcagccgtggaagagacagcggactctaccatctgccacatcctcaacctgtaccggaggaacacgtggctgtaccaggcactgcgggaaggcacgcgggttcagagcgtggagcagatccgcgaggtggcctcgggagcggcccgcatccgtggggagacgctgggcctcattggctttggtcgcacggggcaggcggttgcagttcgagccaaggcctttggattcagcgtcatattttatgacccctacttgcaggatgggatcgagcggtccctgggcgtgcagagggtctacaccctgcaggatttgctgtatcagagcgactgcgtctccttgcactgcaatctcaacgaacataaccaccacctcatcaatgactttaccataaagcagatgaggcagggagcattccttgtgaacgcagcccgtggcggcctggtggacgagaaagccttagcacaagccctcaaggagggcaggatacgaggggcagccctcgacgtgcatgagtcagagcccttcagctttgctcagggtccgttgaaagatgccccgaatctcatctgcactcctcacactgcctggtacagtgagcaggcgtcactggagatgagggaggcagctgccaccgagatccgccgagccatcacaggtcgcatcccagaaagcttaagaaattgtgtgaacaaggaattctttgtcacatcagcgccttggtcagtaatagaccagcaagcaattcatcctgagctcaatggtgccacatacagatatccgccaggcatcgtgggtgtggctccaggaggacttcctgcagccatggaagggatcatccctggaggcatcccagtgactcacaacctcccgacagtggcacatccttcccaagcgccctctcccaaccagcccacaaaacacggggacaatcgagagcaccccaacgagcaatag

SEQ ID NO: 979 - DNA, 1098 bp, Homo sapiens
atgggggtcccgcggcctcagccctgggcgctggggctcctgctctttctccttcctgggagcctgggcgcagaaagccacctctccctcctgtaccaccttaccgcggtgtcctcgcctgccccggggactcctgccttctgggtgtccggctggctgggcccgcagcagtacctgagctacaatagcctgcggggcgaggcggagccctgtggagcttgggtctgggaaaaccaggtgtcctggtattgggagaaagagaccacagatctgaggatcaaggagaagctctttctggaagctttcaaagctttggggggaaaaggtccctacactctgcagggcctgctgggctgtgaactgggccctgacaacacctcggtgcccaccgccaagttcgccctgaacggcgaggagttcatgaatttcgacctcaagcagggcacctggggtggggactggcccgaggccctggctatcagtcagcggtggcagcagcaggacaaggcggccaacaaggagctcaccttcctgctattctcctgcccgcaccgcctgcgggagcacctggagaggggccgcggaaacctggagtggaaggagcccccctccatgcgcctgaaggcccgacccagcagccctggcttttccgtgcttacctgcagcgccttctccttctaccctccggagctgcaacttcggttcctgcggaatgggctggccgctggcaccggccagggtgacttcggccccaacagtgacggatccttccacgcctcgtcgtcactaacagtcaaaagtggcgatgagcaccactactgctgcattgtgcagcacgcggggctggcgcagcccctcagggtggagctggaatctccagccaagtcctccgtgctcgtggtgggaatcgtcatcggtgtcttgctactcacggcagcggctgtaggaggagctctgttgtggagaaggatgaggagtgggctgccagccccttggatctcccttcgtggagacgacaccggggtcctcctgcccaccccaggggaggcccaggatgctgatttgaaggatgtaaatgtgattccagccaccgcctga

SEQ ID NO: 980 - DNA, 852 bp, Homo sapiens
atgtccaagtcattccagcagtcatctctcagtagggactcacagggtcatgggcgtgacctgtctgcggcaggaataggccttcttgctgctgctacccagtctttaagtatgcttcttgaatctgaagatgagctacttgtagatgaagaagaagcagcagcactgctagaaagtggcagttcagtgggagacgagaccgatcttgctaatttaggtgatgtggcttctgatgggaaaaaggaaccatcagataaagctgtgaaaaaagatggaagtgcttcagcagcagcaaagaaaaagcttaaaaagcgtcgttttccagggagtatggaaggttttgtcactctagatgaggttggtgatgaggaagattcggaacttcagaaacttcgtaaatcgggcatggcatttaaatctggtgacaaaaatgatgatggtttggttgaaattaaggtggacaagatcgaggaacttgatcaagaaaacgaagcagcgttggaaaatggaattaaaaatgaggaaaacacagaaccaggtgctgaatcttctgagaacgctgatgatcccaacaaagatacaagtgaaaacgcagatggtcaaagtgatgagaacaaggacgactatacaatcccagatgagtatagaattggaccatatcagcccaatgttcctgttggtatagactatgtgatacctaaaacagggttttactgtaagctgtgttcactcttttatacaaatgaagaagttgcaaagaatactcattgcagcagccttcctcattatcagaaattaaagaaatttctgaataaattggcagaagaacgcagacagaagaaggaaacttaa

SEQ ID NO: 981 - DNA, 963 bp, Homo sapiens
atgcctaaaaaaaagactggtgcgaggaagaaggctgagaaccgccgagaacgtgaaaaacaactaagagcatcaagaagcactatagatttagctaaacatccatgtaatgcctcaatggaatgtgacaagtgtcagaggcggcagaagaatagagcattttgctacttttgtaattctgtacagaagttaccaatttgtgcacagtgtgggaaaacaaagtgcatgatgaagtcttcagactgtgtcataaagcatgctggtgtatacagtactggccttgcaatggtgggtgcaatatgtgacttctgtgaagcttgggtttgccatggtaggaaatgtctcagtacacatgcttgtgcctgccctcttaccgatgctgagtgtgttgaatgtgaacgaggcgtgtgggaccatggaggcagaatattcagttgttctttttgccataactttctctgtgaagatgatcaatttgagcatcaagccagctgccaggttttagaggcagaaacatttaaatgtgtttcatgcaatcggcttggtcagcactcatgtctccgttgtaaggcttgtttctgtgatgatcatacaaggagcaaagtgtttaagcaagaaaaaggaaaacagcctccttgtcctaaatgtgggcatgaaactcaggagactaaggaccttagcatgtcaacacgctccctgaaatttggcaggcagactggaggtgaagagggagatggagcttctgggtatgatgcttattggaagaacctttcatctgataagtatggtgataccagctaccacgatgaggaggaggatgagtatgaagcagaggatgatgaagaggaagaagatgaaggcagaaaggattcagatactgagtcatcagatttgtttactaatttgaatttaggaaggacctatgctagtggctatgctcactatgaggaacaagagaactag

SEQ ID NO: 982 - DNA, 597 bp, Homo sapiens
atggctgccctgacagcggagcattttgcagcactccagagcctgctcaaggcctcctcgaaagatgttgtcagacagctgtgtcaagaaagcttttccagttcagcccttggcttgaaaaaactcttggatgttacatgttccagcttgtctgtgacccaggaggaggcagaggaactgctccaggctctgcaccgcctcactaggctggtggcattccgtgacctgtcctctgccgaggcaattctggctctctttccagaaaatttccaccaaaacctcaaaaacctgctgacaaagatcatcctagaacatgtgtctacttggagaaccgaagcccaggcaaatcagatctctctgccacgcctggtcgatctggactggagagtggatatcaaaacctcctcagacagcatcagccgcatggccgtccccacctgcctgctccagatgaagatccaagaagatcccagcctatgcggagacaaaccctccatctcagctgtcaccgtggagctgagcaaagaaacactggacaccatgttagatggcctgggccgcatccgagaccaactctctgccgtggccagtaaatga

SEQ ID NO: 983 - protein, 465 aa, Homo Sapiens
MTPVRMQHSLAGQTYAVPFIQPDLRREEAVQQMADALQYLQKVSGDIFSRISQQVEQSRSQVQAIGEKVSLAQAKIEKIKGSKKAIKVFSSAKYPAPGRLQEYGSIFTGAQDPGLQRRPRHRIQSKHRPLDERALQEKLKDFPVCVSTKPEPEDDAEEGLGGLPSNISSVSSLLLFNTTENLYKKYVFLDPLAGAVTKTHVMLGAETEEKLFDAPLSISKREQLEQQVPENYFYVPDLGQVPEIHVPSYLPDLPGIANDLMYSADLGPGIAPSAPGTIPELPTFHTEVAEPLKVDLQDGVLTPPPPPPPPPPAPEVLASAPPLPPSTAAPVGQGARQDDSSSSASPSVQGAPREVVDPSGGWATLLESIRQAGGIGKAKLRSMKERKLEKQQQKEQEQVRATSQGGHLMSDLFNKLVMRRKGISGKGPGAGEGPGGAFVRVSDSIPPLPPPQQPQAEEDEDDWES

SEQ ID NO: 984 - protein, 146 aa, Homo Sapiens
MPLDPYHSVTWGHAQGSHHFVFGELRVRPILESLRDEPDPDPRPSREGPAGRVGALARGGPEPCDAASPPGGASCAPELARPREDKSAQQAKLEGGTRLCCRCPEESRLVPGGAVSPGDHVLEVSGTRGTCGCRPRRHAGPELAHS

SEQ ID NO: 985 - protein, 671 aa, Homo Sapiens
MQPDMSLNVIKMKSSDFLESAELDSGGFGKVSLCFHRTQGLMIMKTVYKGPNCIEHNEALLEEAKMMNRLRHSRVVKLLGVIIEEGKYSLVMEYMEKGNLMHVLKAEMSTPLSVKGRIILEIIEGMCYLHGKGVIHKDLKPENILVDNDFHIKIADLGLASFKMWSKLNNEEHNELREVDGTAKKNGGTLYYMAPEHLNDVNAKPTEKSDVYSFAVVLWAIFANKEPYENAICEQQLIMCIKSGNRPDVDDITEYCPREIISLMKLCWEANPEARPTFPGIEEKFRPFYLSQLEESVEEDVKSLKKEYSNENAVVKRMQSLQLDCVAVPSSRSNSATEQPGSLHSSQGLGMGPVEESWFAPSLEHPQEENEPSLQSKLQDEANYHLYGSRMDRQTKQQPRQNVAYNREEERRRRVSHDPFAQQRPYENFQNTEGKGTAYSSAASHGNAVHQPSGLTSQPQVLYQNNGLYSSHGFGTRPLDPGTAGPRVWYRPIPSHMPSLHNIPVPETNYLGNTPTMPFSSLPPTDESIKYTIYNSTGIQIGAYNYMEIGGTSSSLLDSTNTNFKEEPAAKYQAIFDNTTSLTDKHLDPIRENLGKHWKNCARKLGFTQSQIDEIDHDYERDGLKEKVYQMLQKWVMREGIKGATVGKLAQALHQCSRIDLLSSLIYVSQN

SEQ ID NO: 986 - protein, 1217 aa, Homo Sapiens
MFLYNLTLQRATGISFAIHGNFSGTKQQEIVVSRGKILELLRPDPNTGKVHTLLTVEVFGVIRSLMAFRLTGGTKDYIVVGSDSGRIVILEYQPSKNMFEKIHQETFGKSGCRRIVPGQFLAVDPKGRAVMISAIEKQKLVYILNRDAAARLTISSPLEAHKANTLVYHVVGVDVGFENPMFACLEMDYEEADNDPTGEAAANTQQTLTFYELDLGLNHVVRKYSEPLEEHGNFLITVPGGSDGPSGVLICSENYITYKNFGDQPDIRCPIPRRRNDLDDPERGMIFVCSATHKTKSMFFFLAQTEQGDIFKITLETDEDMVTEIRLKYFDTVPVAAAMCVLKTGFLFVASEFGNHYLYQIAHLGDDDEEPEFSSAMPLEEGDTFFFQPRPLKNLVLVDELDSLSPILFCQIADLANEDTPQLYVACGRGPRSSLRVLRHGLEVSEMAVSELPGNPNAVWTVRRHIEDEFDAYIIVSFVNATLVLSIGETVEEVTDSGFLGTTPTLSCSLLGDDALVQVYPDGIRHIRADKRVNEWKTPGKKTIVKCAVNQRQVVIALTGGELVYFEMDPSGQLNEYTERKEMSADVVCMSLANVPPGEQRSRFLAVGLVDNTVRIISLDPSDCLQPLSMQALPAQPESLCIVEMGGTEKQDELGERGSIGFLYLNIGLQNGVLLRTVLDPVTGDLSDTRTRYLGSRPVKLFRVRMQGQEAVLAMSSRSWLSYSYQSRFHLTPLSYETLEFASGFASEQCPEGIVAISTNTLRILALEKLGAVFNQVAFPLQYTPRKFVIHPESNNLIIIETDHNAYTEATKAQRKQQMAEEMVEAAGEDERELAAEMAAAFLNENLPESIFGAPKAGNGQWASVIRVMNPIQGNTLDLVQLEQNEAAFSVAVCRFSNTGEDWYVLVGVAKDLILNPRSVAGGFVYTYKLVNNGEKLEFLHKTPVEEVPAAIAPFQGRVLIGVGKLLRVYDLGKKKLLRKCENKHIANYISGIQTIGHRVIVSDVQESFIWVRYKRNENQLIIFADDTYPRWVTTASLLDYDTVAGADKFGNICVVRLPPNTNDEVDEDPTGNKALWDRGLLNGASQKAEVIMNYHVGETVLSLQKTTLIPGGSESLVYTTLSGGIGILVPFTSHEDHDFFQHVEMHLRSEHPPLCGRDHLSFRSYYFPVKNVIDGDLCEQFNSMEPNKQKNVSEELDRTPPEVSKKLEDIRTRYAF

SEQ ID NO: 987 - protein, 2063 aa, Homo Sapiens
MADGAPRPQLYRSVSFKLLERWSGGPGLREEDTDTPGLRRRASCRPTTAARGQPSRRVSKLASGPLAAPAQPRPLRSLSPSVRQLSRRFDAPRLDDGSAGTRDGGVLPAAAEEAAEGPARGAWPSVTEMRKLFGGPGSRRPSADSESPGTPSPDGAAWEPPARESRQPPTPPPRTCFPLAGLRSARPLTGPETEGRLRRPQQQQERAQRPADGLHSWHIFSQPQAGARASCSSSSIAASYPVSRSRAASSSEEEEEGPPQLPGAQSPAYHGGHSSGSDDDRDGEGGHRWGGRPGLRPGSSLLDQDCRPDSDGLNLSSMNSAGVSGSPEPPTSPRAPREEGLREWGSGSPPCVPGPQEGLRPMSDSVGGAFRVAKVSFPSYLASPAGSRGSSRYSSTETLKDDDLWSSRGSGGWGVYRSPSFGAGEGLLRSQARTRAKGPGGTSRALRDGGFEPEKSRQRKSLSNPDIASETLTLLSFLRSDLSELRVRKPGGSSGDRGSNPLDGRDSPSAGGPVGQLEPIPIPAPASPGTRPTLKDLTATLRRAKSFTCSEKPMARRLPRTSALKSSSSELLLTGPGAEEDPLPLIVQDQYVQEARQVFEKIQRMGAQQDDGSDAPPGSPDWAGDVTRGQRSQEELSGPESSLTDEGIGADPEPPVAAFCGLGTTGMWRPLSSSSAQTNHHGPGTEDSLGGWALVSPETPPTPGALRRRRKVPPSGSGGSELSNGEAGEAYRSLSDPIPQRHRAATSEEPTGFSVDSNLLGSLSPKTGLPATSAMDEGLTSGHSDWSVGSEESKGYQEVIQSIVQGPGTLGRVVDDRIAGKAPKKKSLSDPSRRGELAGPGFEGPGGEPIREVEPMLPPSSSEPILVEQRAEPEEPGATRSRAQSERALPEALPPPATAHRNFHLDPKLADILSPRLIRRGSKKRPARSSHQELRRDEGSQDQTGSLSRARPSSRHVRHASVPATFMPIVVPEPPTSVGPPVAVPEPIGFPTRAHPTLQAPSLEDVTKQYMLNLHSGEVPAPVPVDMPCLPLAAPPSAEAKPPEAARPADEPTPASKCCSKPQVDMRKHVAMTLLDTEQSYVESLRTLMQGYMQPLKQPENSVLCDPSLVDEIFDQIPELLEHHEQFLEQVRHCMQTWHAQQKVGALLVQSFSKDVLVNIYSAYIDNFLNAKDAVRVAKEARPAFLKFLEQSMRENKEKQALSDLMIKPVQRIPRYELLVKDLLKHTPEDHPDHPLLLEAQRNIKQVAERINKGVRSAEEAERHARVLQEIEAHIEGMEDLQAPLRRFLRQEMVIEVKAIGGKKDRSLFLFTDLIVCTTLKRKSGSLRRSSMSLYTAASVIDTASKYKMLWKLPLEDADIIKGASQATNRENIQKAISRLDEDLTTLGQMSKLSESLGFPHQSLDDALRDLSAAMHRDLSEKQALCYALSFPPTKLELCATRPEGTDSYIFEFPHPDARLGFEQAFDEAKRKLASSKSCLDPEFLKAIPIMKTRSGMQFSCAAPTLNSCPEPSPEVWVCNSDGYVGQVCLLSLRAEPDVEACIAVCSARILCIGAVPGLQPRCHREPPPSLRSPPETAPEPAGPELDVEAAADEEAATLAEPGPQPCLHISIAGSGLEMTPGLGEGDPRPELVPFDSDSDDESSPSPSGTLQSQASRSTISSSFGNEETPSSKEATAETTSSEEEQEPGFLPLSGSFGPGGPCGTSPMDGRALRRSSHGSFTRGSLEDLLSVDPEAYQSSVWLGTEDGCVHVYQSSDSIRDRRNSMKLQHAASVTCILYLNNQVFVSLANGELVVYQREAGHFWDPQNFKSVTLGTQGSPITKMVSVGGRLWCGCQNRVLVLSPDTLQLEHMFYVGQDSSRCVACMVDSSLGVWVTLKGSAHVCLYHPDTFEQLAEVDVTPPVHRMLAGSDAIIRQHKAACLRITALLVCEELLWVGTSAGVVLTMPTSPGTVSCPRAPLSPTGLGQGHTGHVRFLAAVQLPDGFNLLCPTPPPPPDTGPEKLPSLEHRDSPWHRGPAPARPKMLVISGGDGYEDFRLSSGGGSSSETVGRDDSTNHLLLWRV

SEQ ID NO: 988 - protein, 180 aa, Homo Sapiens
MGDKKSPTRPKRQPKPSSDEGYWDCSVCTFRNSAEAFKCMMCDVRKGTSTRKPRPVSQLVAQQVTQQFVPPTQSKKEKKDKVEKEKSEKETTSKKNSHKKTRPRLKNVDRSSAQHLEVTVGDLTVIITDFKEKTKSPPASSAASADQHSQSGSSSDNTERGMSRSSSPRGEASSLNGESH

SEQ ID NO: 989 - protein, 295 aa, Homo Sapiens
MGLPVSWAPPALWVLGCCALLLSLWALCTACRRPEDAVAPRKRARRQRARLQGSATAAEASLLRRTHLCSLSKSDTRLHELHRGPRSSRALRPASMDLLRPHWLEVSRDITGPQAAPSAFPHQELPRALPAAAATAGCAGLEATYSNVGLAALPGVSLAASPVVAEYARVQKRKGTHRSPQEPQQGKTEVTPAAQVDVLYSRVCKPKRRDPGPTTDPLDPKGQGAILALAGDLAYQTLPLRALDVDSGPLENVYESIRELGDPAGRSSTCGAGTPPASSCPSLGRGWRPLPASLP

SEQ ID NO: 990 - protein, 153 aa, Homo Sapiens
MARNTLSSRFRRVDIDEFDENKFVDEQEEAAAAAAEPGPDPSEVDGLLRQGDMLRAFHAALRNSPVNTKNQAVKERAQGVVLKVLTNFKSSEIEQAVQSLDRNGVDLLMKYIYKGFEKPTENSSAVLLQWHEKALAVGGLGSIIRVLTARKTV

SEQ ID NO: 991 - protein, 103 aa, Homo Sapiens
MSDCYTELEKAVIVLVENFYKYVSKYSLVKNKISKSSFREMLQKELNHMLSDTGNRKAADKLIQNLDANHDGRISFDEYWTLIGGITGPIAKLIHEQEQQSSS

SEQ ID NO: 992 - protein, 174 aa, Homo Sapiens
MGKITLYEDRGFQGRHYECSSDHPNLQPYLSRCNSARVDSGCWMLYEQPNYSGLQYFLRRGDYADHQQWMGLSDSVRSCRLIPHSGSHRIRLYEREDYRGQMIEFTEDCSCLQDRFRFNEIHSLNVLEGSWVLYELSNYRGRQYLLMPGDYRRYQDWGATNARVGSLRRVIDFS

SEQ ID NO: 993 - protein, 2923 aa, Homo Sapiens
MRSPATGVPLPTPPPPLLLLLLLLLPPPLLGDQVGPCRSLGSRGRGSSGACAPMGWLCPSSASNLWLYTSRCRDAGTELTGHLVPHHDGLRVWCPESEAHIPLPPAPEGCPWSCRLLGIGGHLSPQGKLTLPEEHPCLKAPRLRCQSCKLAQAPGLRAGERSPEESLGGRRKRNVNTAPQFQPPSYQATVPENQPAGTPVASLRAIDPDEGEAGRLEYTMDALFDSRSNQFFSLDPVTGAVTTAEELDRETKSTHVFRVTAQDHGMPRRSALATLTILVTDTNDHDPVFEQQEYKESLRENLEVGYEVLTVRATDGDAPPNANILYRLLEGSGGSPSEVFEIDPRSGVIRTRGPVDREEVESYQLTVEASDQGRDPGPRSTTAAVFLSVEDDNDNAPQFSEKRYVVQVREDVTPGAPVLRVTASDRDKGSNAVVHYSIMSGNARGQFYLDAQTGALDVVSPLDYETTKEYTLRVRAQDGGRPPLSNVSGLVTVQVLDINDNAPIFVSTPFQATVLESVPLGYLVLHVQAIDADAGDNARLEYRLAGVGHDFPFTINNGTGWISVAAELDREEVDFYSFGVEARDHGTPALTASASVSVTVLDVNDNNPTFTQPEYTVRLNEDAAVGTSVVTVSAVDRDAHSVITYQITSGNTRNRFSITSQSGGGLVSLALPLDYKLERQYVLAVTASDGTRQDTAQIVVNVTDANTHRPVFQSSHYTVNVNEDRPAGTTVVLISATDEDTGENARITYFMEDSIPQFRIDADTGAVTTQAELDYEDQVSYTLAITARDNGIPQKSDTTYLEILVNDVNDNAPQFLRDSYQGSVYEDVPPFTSVLQISATDRDSGLNGRVFYTFQGGDDGDGDFIVESTSGIVRTLRRLDRENVAQYVLRAYAVDKGMPPARTPMEVTVTVLDVNDNPPVFEQDEFDVFVEENSPIGLAVARVTATDPDEGTNAQIMYQIVEGNIPEVFQLDIFSGELTALVDLDYEDRPEYVLVIQATSAPLVSRATVHVRLLDRNDNPPVLGNFEILFNNYVTNRSSSFPGGAIGRVPAHDPDISDSLTYSFERGNELSLVLLNASTGELKLSRALDNNRPLEAIMSVLVSDGVHSVTAQCALRVTIITDEMLTHSITLRLEDMSPERFLSPLLGLFIQAVAATLATPPDHVVVFNVQRDTDAPGGHILNVSLSVGQPPGPGGGPPFLPSEDLQERLYLNRSLLTAISAQRVLPFDDNICLREPCENYMRCVSVLRFDSSAPFIASSSVLFRPIHPVGGLRCRCPPGFTGDYCETEVDLCYSRPCGPHGRCRSREGGYTCLCRDGYTGEHCEVSARSGRCTPGVCKNGGTCVNLLVGGFKCDCPSGDFEKPYCQVTTRSFPAHSFITFRGLRQRFHFTLALSFATKERDGLLLYNGRFNEKHDFVALEVIQEQVQLTFSAGESTTTVSPFVPGGVSDGQWHTVQLKYYNKPLLGQTGLPQGPSEQKVAVVTVDGCDTGVALRFGSVLGNYSCAAQGTQGGSKKSLDLTGPLLLGGVPDLPESFPVRMRQFVGCMRNLQVDSRHIDMADFIANNGTVPGCPAKKNVCDSNTCHNGGTCVNQWDAFSCECPLGFGGKSCAQEMANPQHFLGSSLVAWHGLSLPISQPWYLSLMFRTRQADGVLLQAITRGRSTITLQLREGHVMLSVEGTGLQASSLRLEPGRANDGDWHHAQLALGASGGPGHAILSFDYGQQRAEGNLGPRLHGLHLSNITVGGIPGPAGGVARGFRGCLQGVRVSDTPEGVNSLDPSHGESINVEQGCSLPDPCDSNPCPANSYCSNDWDSYSCSCDPGYYGDNCTNVCDLNPCEHQSVCTRKPSAPHGYTCECPPNYLGPYCETRIDQPCPRGWWGHPTCGPCNCDVSKGFDPDCNKTSGECHCKENHYRPPGSPTCLLCDCYPTGSLSRVCDPEDGQCPCKPGVIGRQCDRCDNPFAEVTTNGCEVNYDSCPRAIEAGIWWPRTRFGLPAAAPCPKGSFGTAVRHCDEHRGWLPPNLFNCTSITFSELKGFAERLQRNESGLDSGRSQQLALLLRNATQHTAGYFGSDVKVAYQLATRLLAHESTQRGFGLSATQDVHFTENLLRVGSALLDTANKRHWELIQQTEGGTAWLLQHYEAYASALAQNMRHTYLSPFTIVTPNIVISVVRLDKGNFAGAKLPRYEALRGEQPPDLETTVILPESVFRETPPVVRPAGPGEAQEPEELARRQRRHPELSQGEAVASVIIYRTLAGLLPHNYDPDKRSLRVPKRPIINTPVVSISVHDDEELLPRALDKPVTVQFRLLETEERTKPICVFWNHSILVSGTGGWSARGCEVVFRNESHVSCQCNHMTSFAVLMDVSRRENGEILPLKTLTYVALGVTLAALLLTFFFLTLLRILRSNQHGIRRNLTAALGLAQLVFLLGINQADLPFACTVIAILLHFLYLCTFSWALLEALHLYRALTEVRDVNTGPMRFYYMLGWGVPAFITGLAVGLDPEGYGNPDFCWLSIYDTLIWSFAGPVAFAVSMSVFLYILAARASCAAQRQGFEKKGPVSGLQPSFAVLLLLSATWLLALLSVNSDTLLFHYLFATCNCIQGPFIFLSYVVLSKEVRKALKLACSRKPSPDPALTTKSTLTSSYNCPSPYADGRLYQPYGDSAGSLHSTSRSGKSQPSYIPFLLREESALNPGQGPPGLGDPGSLFLEGQDQQHDPDTDSDSDLSLEDDQSGSYASTHSSDSEEEEEEEEEEAAFPGEQGWDSLLGPGAERLPLHSTPKDGGPGPGKAPWPGDFGTTAKESSGNGAPEERLRENGDALSREGSLGPLPGSSAQPHKGILKKKCLPTISEKSSLLRLPLEQCTGSSRGSSASEGSRGGPPPRPPPRQSLQEQLNGVMPIAMSIKAGTVDEDSSGSEFLFFNFLH

SEQ ID NO: 994 - protein, 1320 aa, Homo Sapiens
MFGLDQFEPQVNSRNAGQGERNFNETGLSMNTHFKAPAFHTGGPPGPVDPAMSALGEPPILGMNMEPYGFHARGHSELHAGGLQAQPVHGFFGGQQPHHGHPGSHHPHQHHPHFGGNFGGPDPGASCLHGGRLLGYGGAAGGLGSQPPFAEGYEHMAESQGPESFGPQRPGNLPDFHSSGASSHAVPAPCLPLDQSPNRAASFHGLPSSSGSDSHSLEPRRVTNQGAVDSLEYNYPGEAPSGHFDMFSPSDSEGQLPHYAAGRQVPGGAFPGASAMPRAAGMVGLSKMHAQPPQQQPQQQQQPQQQQQQHGVFFERFSGARKMPVGLEPSVGSRHPLMQPPQQAPPPPQQQPPQQPPQQQPPPPPGLLVRQNSCPPALPRPQQGEAGTPSGGLQDGGPMLPSQHAQFEYPIHRLENRSMHPYSEPVFSMQHPPPQQAPNQRLQHFDAPPYMNVAKRPRFDFPGSAGVDRCASWNGSMHNGALDNHLSPSAYPGLPGEFTPPVPDSFPSGPPLQHPAPDHQSLQQQQQQQQQQQQQQQQQQQQQQQQQQQQRQNAALMIKQMASRNQQQRLRQPNLAQLGHPGDVGQGGLVHGGPVGGLAQPNFEREGGSTGAGRLGTFEQQAPHLAQESAWFSGPHPPPGDLLPRRMGGSGLPADCGPHDPSLAPPPPPGGSGVLFRGPLQEPMRMPGEGHVPALPSPGLQFGGSLGGLGQLQSPGAGVGLPSAASERRPPPPDFATSALGGQPGFPFGAAGRQSTPHSGPGVNSPPSAGGGGGSSGGGGGGGAYPPQPDFQPSQRTSASKLGALSLGSFNKPSSKDNLFGQSCLAALSTACQNMIASLGAPNLNVTFNKKNPPEGKRKLSQNETDGAAVAGNPGSDYFPGGTAPGAPGPGGPSGTSSSGSKASGPPNPPAQGDGTSLSPNYTLESTSGNDGKPVSGGGGRGRGRRKRDSGHVSPGTFFDKYSAAPDSGGAPGVSPGQQQASGAAVGGSSAGETRGAPTPHEKALTSPSWGKGAELLLGDQPDLIGSLDGGAKSDSSSPNVGEFASDEVSTSYANEDEVSSSSDNPQALVKASRSPLVTGSPKLPPRGVGAGEHGPKAPPPALGLGIMSNSTSTPDSYGGGGGPGHPGTPGLEQVRTPTSSSGAPPPDEIHPLEILQAQIQLQRQQFSISEDQPLGLKGGKKGECAVGASGAQNGDSELGSCCSEAVKSAMSTIDLDSLMAEHSAAWYMPADKALVDSADDDKTLAPWEKAKPQNPNSKEAHDLPANKASASQPGSHLQCLSVHCTDDVGDAKARASVPTWRSLHSDISNRFGTFVAALT

SEQ ID NO: 995 - protein, 130 aa, Homo Sapiens
MSGRGKQGGKARAKAKSRSSRAGLQFPVGRVHRLLRKGNYAERVGAGAPVYLAAVLEYLTAEILELAGNAARDNKKTRIIPRHLQLAIRNDEELNKLLGRVTIAQGGVLPNIQAVLLPKKTESHHKAKGK

SEQ ID NO: 996 - protein, 305 aa, Homo Sapiens
MSALLRLLRTGAPAAACLRLGTSAGTGSRRAMALYHTEERGQPCSQNYRLFFKNVTGHYISPFHDIPLKVNSKEENGIPMKKARNDEYENLFNMIVEIPRWTNAKMEIATKEPMNPIKQYVKDGKLRYVANIFPYKGYIWNYGTLPQILSCGEVIHVKILGILALIDEGETDWKLIAINANDPEASKFHDIDDVKKFKPGYLEATLNWFRLYKVPDGKPENQFAFNGEFKNKAFALEVIKSTHQCWKALLMKKCNGGAINCTNVQISDSPFRCTQEEARSLVESVSSSPNKESNEEEQVWHFLGK

SEQ ID NO: 997 - protein, 575 aa, Homo Sapiens
MPPGKVLQPVLKMKVDELFLYWLSEASTQRMLQDCLRRIKAPGRDQPTPGDGEQPGAWPTAPLAAPRPSGLEPPGTPGPGPALPLGAASSPRNAPHVRGTRRSAGTRVVQTRKEEPLPPATSQSIPTFYFPRGRPQDSVNVDAVISKIESTFARFPHERATMDDMGLVAKACGCPLYWKGPLFYGAGGERTGSVSVHKFVAMWRKILQNCHDDAAKFVHLLMSPGCNYLVQEDFVPFLQDVVNTHPGLSFLKEASEFHSRYITTVIQRIFYAVNRSWSGRITCAELRRSSFLQNVALLEEEADINQLTEFFSYEHFYVIYCKFWELDTDHDLLIDADDLARHNDHALSTKMIDRIFSGAVTRGRKVQKEGKISYADFVWFLISEEDKKTPTSIEYWFRCMDLDGDGALSMFELEYFYEEQCRRLDSMAIEALPFQDCLCQMLDLVKPRTEGKITLQDLKRCKLANVFFDTFFNIEKYLDHEQKEQISLLRDGDSGGPELSDWEKYAAEEYDILVAEETAGEPWEDGFEAELSPVEQKLSALRSPLAQRPFFEAPSPLGAVDLYEYACGDEDLEPL

SEQ ID NO: 998 - protein, 272 aa, Homo Sapiens
MRRSRSSAAAKLRGQKRSGASAAPAASAAAALAPSATRTRRSASQAGSKSQAVEKPPSEKPRLRRSSPRAQEEGPGEPPPPELALLPPPPPPPPTPATPTSSASNLDLGEQRERWETFQKRQKLTSEGAAKLLLDTFEYQGLVKHTGGCHCGAVRFEVWASADLHIFDCNCSICKKKQNRHFIVPASRFKLLKGAEHITTYTFNTHKAQHTFCKRCGVQSFYTPRSNPGGFGIAPHCLDEGTVRSMVTEEFNGSDWEKAMKEHKTIKNMSKE

SEQ ID NO: 999 - protein, 68 aa, Homo Sapiens
MPQKDPCQKQACEIQKCLQANSYMESKCQAVIQELRKCCAQYPKGRSVVCSGFEKEEEENLTRKSASK

SEQ ID NO: 1000 - protein, 1037 aa, Homo Sapiens
MWRCGGRQGLCVLRRLSGGHAHHRAWRWNSNRACERALQYKLGDKIHGFTVNQVTSVPELFLTAVKLTHDDTGARYLHLAREDTNNLFSVQFRTTPMDSTGVPHILEHTVLCGSQKYPCRDPFFKMLNRSLSTFMNAFTASDYTLYPFSTQNPKDFQNLLSVYLDATFFPCLRELDFWQEGWRLEHENPSDPQTPLVFKGVVFNEMKGAFTDNERIFSQHLQNRLLPDHTYSVVSGGDPLCIPELTWEQLKQFHATHYHPSNARFFTYGNFPLEQHLKQIHEEALSKFQKIEPSTVVPAQTPWDKPREFQITCGPDSFATDPSKQTTISVSFLLPDITDTFEAFTLSLLSSLLTSGPNSPFYKALIESGLGTDFSPDVGYNGYTREAYFSVGLQGIAEKDIETVRSLIDRTIDEVVEKGFEDDRIEALLHKIEIQMKHQSTSFGLMLTSYIASCWNHDGDPVELLKLGNQLAKFRQCLQENPKFLQEKVKQYFKNNQHKLTLSMRPDDKYHEKQAQVEATKLKQKVEALSPGDRQQIYEKGLELRSQQSKPQDASCLPALKVSDIEPTIPVTELDVVLTAGDIPVQYCAQPTNGMVYFRAFSSLNTLPEELRPYVPLFCSVLTKLGCGLLDYREQAQQIELKTGGMSASPHVLPDDSHMDTYEQGVLFSSLCLDRNLPDMMQLWSEIFNNPCFEEEEHFKVLVKMTAQELANGIPDSGHLYASIRAGRTLTPAGDLQETFSGMDQVRLMKRIAEMTDIKPILRKLPRIKKHLLNGDNMRCSVNATPQQMPQTEKAVEDFLRSIGRSKKERRPVRPHTVEKPVPSSSGGDAHVPHGSQVIRKLVMEPTFKPWQMKTHFLMPFPVNYVGECIRTVPYTDPDHASLKILARLMTAKFLHTEIREKGGAYGGGAKLSHNGIFTLYSYRDPNTIETLQSFGKAVDWAKSGKFTQQDIDEAKLSVFSTVDAPVAPSDKGMDHFLYGLSDEMKQAHREQLFAVSHDKLLAVSDRYLGTGKSTHGLAILGPENPKIAKDPSWIIQ

SEQ ID NO: 1001 - protein, 537 aa, Homo Sapiens
MLNTLQTNAGYLEQVKRQRGDPQTQLEAMELYLARSGLQVEDLDRLNIIHVTGTKGKGSTCAFTECILRSYGLKTGFFSSPHLVQVRERIRINGQPISPELFTKYFWRLYHRLEETKDGSCVSMPPYFRFLTLMAFHVFLQEKVDLAVVEVGIGGAYDCTNIIRKPVVCGVSSLGIDHTSLLGDTVEKIAWQKGGIFKQGVPAFTVLQPEGPLAVLRDRAQQISCPLYLCPMLEALEEGGPPLTLGLEGEHQRSNAALALQLAHCWLQRQDRHGAGEPKASRPGLLWQLPLAPVFQPTSHMRLGLRNTEWPGRTQVLRRGPLTWYLDGAHTASSAQACVRWFRQALQGRERPSGGPEVRVLLFNATGDRDPAALLKLLQPCQFDYAVFCPNLTEVSSTGNADQQNFTVTLDQVLLRCLEHQQHWNHLDEEQASPDLWSAPSPEPGGSASLLLAPHPPHTCSASSLVFSCISHALQWISQGRDPIFQPPSPPKGLLTHPVAHSGASILREAAAIHVLVTGSLHLVGGVLKLLEPALSQ

SEQ ID NO: 1002 - protein, 149 aa, Homo Sapiens
MKVASGSTATAAAGPSCALKAGKTASGAGEVVRCLSEQSVAISRCAGGAGARLPALLDEQQVNVLLYDMNGCYSRLKELVPTLPQNRKVSKVEILQHVIDYIRDLQLELNSESEVGTPGGRGLPVRAPLSTLNGEISALTAEVRSRSDH

SEQ ID NO: 1003 - protein, 380 aa, Homo Sapiens
MGAAAAEAPLRLPAAPPLAFCCYTSVLLLFAFSLPGSRASNQPPGGGGGSGGDCPGGKGKSINCSELNVRESDVRVCDESSCKYGGVCKEDGDGLKCACQFQCHTNYIPVCGSNGDTYQNECFLRRAACKHQKEITVIARGPCYSDNGSGSGEGEEEGSGAEVHRKHSKCGPCKYKAECDEDAENVGCVCNIDCSGYSFNPVCASDGSSYNNPCFVREASCIKQEQIDIRHLGHCTDTDDTSLLGKKDDGLQYRPDVKDASDQREDVYIGNHMPCPENLNGYCIHGKCEFIYSTQKASCRCESGYTGQHCEKTDFSILYVVPSRQKLTHVLIAAIIGAVQIAIIVAIVMCITRKCPKNNRGRRQKQNLGHFTSDTSSRMV

SEQ ID NO: 1004 - protein, 1092 aa, Homo Sapiens
MPCGFSPSPVAHHLVPGPPDTPAQQLRCGWTVGGWLLSLVRGLLPCLPPGARTAEGPIMVLAGPLAVSLLLPSLTLLVSHLSSSQDVSSEPSSEQQLCALSKHPTVAFEDLQPWVSNFTYPGARDFSQLALDPSGNQLIVGARNYLFRLSLANVSLLQATEWASSEDTRRSCQSKGKTEEECQNYVRVLIVAGRKVFMCGTNAFSPMCTSRQVGNLSRTIEKINGVARCPYDPRHNSTAVISSQGELYAATVIDFSGRDPAIYRSLGSGPPLRTAQYNSKWLNEPNFVAAYDIGLFAYFFLRENAVEHDCGRTVYSRVARVCKNDVGGRFLLEDTWTTFMKARLNCSRPGEVPFYYNELQSAFHLPEQDLIYGVFTTNVNSIAASAVCAFNLSAISQAFNGPFRYQENPRAAWLPIANPIPNFQCGTLPETGPNENLTERSLQDAQRLFLMSEAVQPVTPEPCVTQDSVRFSHLVVDLVQAKDTLYHVLYIGTESGTILKALSTASRSLHGCYLEELHVLPPGRREPLRSLRILHSARALFVGLRDGVLRVPLERCAAYRSQGACLGARDPYCGWDGKQQRCSTLEDSSNMSLWTQNITACPVRNVTRDGGFGPWSPWQPCEHLDGDNSGSCLCRARSCDSPRPRCGGLDCLGPAIHIANCSRNGAWTPWSSWALCSTSCGIGFQVRQRSCSNPAPRHGGRIFVGKSREERFCNENTPCPVPIFWASWGSWSKCSSNCGGGMQSRRRACENGNSCLGCGEFKTCNPEGCPEVRRNTPWTPWLPVNVTQGGARQEQRFRFTCRAPLADPHGLQFGRRRTETRTCPADGSGSCDTDALVEVLLRSGSTSPHTVSGGWAAWGPWSSCSRDCELGFRVRKRTCTNPEPRNGGLPCVGDAAEYQDCNPQACPVRGAWSCWTSWSPCSASCGGGHYQRTRSCTSPAPSPGEDICLGLHTEEALCATQACPGWSPWSEWSKCTDDGAQSRSRHCEELLPGSSACAGNSSQSRPCPYSEIPVILPASSMEEATDCAGKRNRTYLMLRSSQPSSTPLQSLDSFHILLQTAKLCWGPHCFEMGSISSTWWPRASPASWALGS

SEQ ID NO: 1005 - protein, 298 aa, Homo Sapiens
MARRSRHRLLLLLLRYLVVALGYHKAYGFSAPKDQQVVTAVEYQEAILACKTPKKTVSSRLEWKKLGRSVSFVYYQQTLQGDFKNRAEMIDFNIRIKNVTRSDAGKYRCEVSAPSEQGQNLEEDTVTLEVLVAPAVPSCEVPSSALSGTVVELRCQDKEGNPAPEYTWFKDGIRLLENPRLGSQSTNSSYTMNTKTGTLQFNTVSKLDTGEYSCEARNSVGYRRCPGKRMQVDDLNISGIIAAVVVVALVISVCGLGVCYAQRKGYFSKETSFQKSNSSSKATTMSENDFKHTKSFII

SEQ ID NO: 1006 - protein, 381 aa, Homo Sapiens
MAAFGRQVLDWHRLIPLTWACMARQTPHLGEQRRTTASLLRKLTTASNGGVIEELSCVRSNNYVQEPECRRNLVQCLLEKQGTPVVQGSLELERVMSSLLDMGFSNAHINELLSVRRGASLQQLLDIISEFILLGLNPEPVCVVLKKSPQLLKLPIMQMRKRSSYLQKLGLGEGKLKRVLYCCPEIFTMRQQDINDTVRLLKEKCLFTVQQVTKILHSCPSVLREDLGQLEYKFQYAYFRMGIKHPDIVKSEYLQYSLTKIKQRHIYLERLGRYQTPDKKGQTQIPNPLLKDILRVSEAEFLARTACTSVEEFQVFKKLLAREEEESESSTSDDKRASLDEDEDDDDEEDNDEDDNDEDDDDEDDDEAEDNDEDEDDDEEE

SEQ ID NO: 1007 - protein, 346 aa, Homo Sapiens
MALDVKSRAKRYEKLDFLGEGQFATVYKARDKNTNQIVAIKKIKLGHRSEAKDGINRTALREIKLLQELSHPNIIGLLDAFGHKSNISLVFDFMETDLEVIIKDNSLVLTPSHIKAYMLMTLQGLEYLHQHWILHRDLKPNNLLLDENGVLKLADFGLAKSFGSPNRAYTHQVVTRWYRAPELLFGARMYGVGVDMWAVGCILAELLLRVPFLPGDSDLDQLTRIFETLGTPTEEQWPDMCSLPDYVTFKSFPGIPLHHIFSAAGDDLLDLIQGLFLFNPCARITATQALKMKYFSNRPGPTPGCQLPRPNCPVETLKEQSNPALAIKRKRTEALEQGGLPKKLIF

SEQ ID NO: 1008 - protein, 228 aa, Homo Sapiens
MAWKSGGASHSELIHNLRKNGIIKTDKVFEVMLATDRSHYAKCNPYMDSPQSIGFQATISAPHMHAYALELLFDQLHEGAKALDVGSGSGILTACFARMVGCTGKVIGIDHIKELVDDSVNNVRKDDPTLLSSGRVQLVVGDGRMGYAEEAPYDAIHVGAAAPVVPQALIDQLKPGGRLILPVGPAGGNQMLEQYDKLQDGSIKMKPLMGVIYVPLTDKEKQWSRDEL

SEQ ID NO: 1009 - protein, 1369 aa, Homo Sapiens
MGGKNKKHKAPAAAVVRAAVSASRAKSAEAGIAGEAQSKKPVSRPATAAAAAAGSREPRVKQGPKIYSFNSTNDSSGPANLDKSILKVVINNKLEQRIIGVINEHKKQNNDKGMISGRLTAKKLQDLYMALQAFSFKTKDIEDAMTNTLLYGGDLHSALDWLCLNLSDDALPEGFSQEFEEQQPKSRPKFQSPQIQATISPPLQPKTKTYEEDPKSKPKKEEKNMEVNMKEWILRYAEQQNEEEKNENSKSLEEEEKFDPNERYLHLAAKLLDAKEQAATFKLEKNKQGQKEAQEKIRKFQREMETLEDHPVFNPAMKISHQQNERKKPPVATEGESALNFNLFEKSAAATEEEKDKKKEPHDVRNFDYTARSWTGKSPKQFLIDWVRKNLPKSPNPSFEKVPVGRYWKCRVRVIKSEDDVLVVCPTILTEDGMQAQHLGATLALYRLVKGQSVHQLLPPTYRDVWLEWSDAEKKREELNKMETNKPRDLFIAKLLNKLKQQQQQQQQHSENKRENSEDPEESWENLVSDEDFSALSLESANVEDLEPVRNLFRKLQSTPKYQKLLKERQQLPVFKHRDSIVETLKRHRVVVVAGETGSGKSTQVPHFLLEDLLLNEWEASKCNIVCTQPRRISAVSLANRVCDELGCENGPGGRNSLCGYQIRMESRACESTRLLYCTTGVLLRKLQEDGLLSNVSHVIVDEVHERSVQSDFLLIILKEILQKRSDLHLILMSATVDSEKFSTYFTHCPILRISGRSYPVEVFHLEDIIEETGFVLEKDSEYCQKFLEEEEEVTINVTSKAGGIKKYQEYIPVQTGAHADLNPFYQKYSSRTQHAILYMNPHKINLDLILELLAYLDKSPQFRNIEGAVLIFLPGLAHIQQLYDLLSNDRRFYSERYKVIALHSILSTQDQAAAFTLPPPGVRKIVLATNIAETGITIPDVVFVIDTGRTKENKYHESSQMSSLVETFVSKASALQRQGRAGRVRDGFCFRMYTRERFEGFMDYSVPEILRVPLEELCLHIMKCNLGSPEDFLSKALDPPQLQVISNAMNLLRKIGACELNEPKLTPLGQHLAALPVNVKIGKMLIFGAIFGCLDPVATLAAVMTEKSPFTTPIGRKDEADLAKSALAMADSDHLTIYNAYLGWKKARQEGGYRSEITYCRRNFLNRTSLLTLEDVKQELIKLVKAAGFSSSTTSTSWEGNRASQTLSFQEIALLKAVLVAGLYDNVGKIIYTKSVDVTEKLACIVETAQGKAQVHPSSVNRDLQTHGWLLYQEKIRYARVYLRETTLITPFPVLLFGGDIEVQHRERLLSIDGWIYFQAPVKIAVIFKQLRVLIDSVLRKKLENPKMSLENDKILQIITELIKTENN

SEQ ID NO: 1010 - protein, 793 aa, Homo Sapiens
MEARVERAVQKRQVLFLCVFLGMSWAGAEPLRYFVAEETERGTFLTNLAKDLGLGVGELRARGTRIVSDQNMQILLLSSLTGDLLLNEKLDREELCGPREPCVLPFQLLLEKPFQIFRAELWVRDINDHAPVFLDREISLKILESTTPGAAFLLESAQDSDVGTNSLSNYTISPNAYFHINVHDSGEGNIYPELVLNQVLDREEIPEFSLTLTALDGGSPPRSGTALVRILVLDVNDNAPDFVRSLYKVQVPENSPVGSMVVSVSARDLDTGSNGEIAYAFSYATERILKTFQINPTSGSLHLKAQLDYEAIQTYTLTIQAKDGGGLSGKCTVVVDVTDINDNRPELLLSSLTSPIAENSPETVVAVFRIRDRDSGNNGKTVCSIQDDVPFILKPSVENFYTLVTEKPLDRERNTEYNITITVTDLGTPRLKTEHNITVLVSDVNDNAPAFTQTSYTLFVRENNSPALPIGSVSATDRDSGTNAQVIYSLLPSQDPHLPLASLVSINADNGHLFALRSLDYEALQAFEFRVGATDRGSPALSSEALVRVLVLDANDNSPFVLYPLQNSSAPCTEPLPRAAEPGYLVTKVVAVDGDSGQNAWLSYQLLKATEPGLFGVWAHNGEVRTARLLSERDAAKQRLVVLVKDNGEPPRSATATLHVLLVDGFSQPYLRLPEAAPDQANSLTVYLVVALASVSSLFLLSVLLFVAVRLCRRSRAAPVGRCSVPEGPFPRHLVDLSGTGTLSQSYQYEVCLTGGSGTNEFKFLKPIIPNLLPQSTGREVEENRPFQNNLGF

SEQ ID NO: 1011 - protein, 628 aa, Homo Sapiens
MGSCARLLLLWGCTVVAAGLSGVAGVSSRCEKACNPRMGNLALGRKLWADTTCGQNATELYCFYSENTDLTCRQPKCDKCNAAYPHLAHLPSAMADSSFRFPRTWWQSAEDVHREKIQLDLEAEFYFTHLIVMFKSPRPAAMVLDRSQDFGKTWKPYKYFATNCSATFGLEDDVVKKGAICTSKYSSPFPCTGGEVIFKALSPPYDTENPYSAKVQEQLKITNLRVQLLKRQSCPCQRNDLNEEPQHFTHYAIYDFIVKGSCFCNGHADQCIPVHGFRPVKAPGTFHMVHGKCMCKHNTAGSHCQHCAPLYNDRPWEAADGKTGAPNECRTCKCNGHADTCHFDVNVWEASGNRSGGVCDDCQHNTEGQYCQRCKPGFYRDLRRPFSAPDACKPCSCHPVGSAVLPANSVTFCDPSNGDCPCKPGVAGRRCDRCMVGYWGFGDYGCRPCDCAGSCDPITGDCISSHTDIDWYHEVPDFRPVHNKSEPAWEWEDAQGFSALLHSGKCECKEQTLGNAKAFCGMKYSYVLKIKILSAHDKGTHVEVNVKIKKVLKSTKLKIFRGKRTLYPESWTDRGCTCPILNPGLEYLVAGHEDIRTGKLIVNMKSFVQHWKPSLGRKVMDILKRECK

SEQ ID NO: 1012 - protein, 688 aa, Homo Sapiens
MWCIVLFSLLAWVYAEPTMYGEILSPNYPQAYPSEVEKSWDIEVPEGYGIHLYFTHLDIELSENCAYDSVQIISGDTEEGRLCGQRSSNNPHSPIVEEFQVPYNKLQVIFKSDFSNEERFTGFAAYYVATDINECTDFVDVPCSHFCNNFIGGYFCSCPPEYFLHDDMKNCGVNCSGDVFTALIGEIASPNYPKPYPENSRCEYQIRLEKGFQVVVTLRREDFDVEAADSAGNCLDSLVFVAGDRQFGPYCGHGFPGPLNIETKSNALDIIFQTDLTGQKKGWKLRYHGDPMPCPKEDTPNSVWEPAKAKYVFRDVVQITCLDGFEVVEGRVGATSFYSTCQSNGKWSNSKLKCQPVDCGIPESIENGKVEDPESTLFGSVIRYTCEEPYYYMENGGGGEYHCAGNGSWVNEVLGPELPKCVPVCGVPREPFEEKQRIIGGSDADIKNFPWQVFFDNPWAGGALINEYWVLTAAHVVEGNREPTMYVGSTSVQTSRLAKSKMLTPEHVFIHPGWKLLEVPEGRTNFDNDIALVRLKDPVKMGPTVSPICLPGTSSDYNLMDGDLGLISGWGRTEKRDRAVRLKAARLPVAPLRKCKEVKVEKPTADAEAYVFTPNMICAGGEKGMDSCKGDSGGAFAVQDPNDKTKFYAAGLVSWGPQCGTYGLYTRVKNYVDWIMKTMQENSTPRED

SEQ ID NO: 1013 - protein, 430 aa, Homo Sapiens
MATLSVKPSRRFQLPDWHTNSYLLSTNAQLQRDASHQIRQEARVLRNETNNQTIWDEHDNRTRLVERIDTVNRWKEMLDKCLTDLDAEIDALTQMKESAEQNLQAKNLPLDVAIECLTLRESRRDIDVVKDPVEDELHKEVEVIEATKKALQQKVSQAFEQLCLLQEVQQQLNSDHRGKMETLEIDRGCLSLNLRSPNISLKVDPTRVPDGSTTLQQWDDFSRFNKDRAEAEMKAATELREATALTIAETNNELEAQRVATEFAFRKRLREMEKVYSELKWQEKNTLEEIAELQEDIRHLEEDLRTKLLSLKLSHTRLEARTYRPNVELCRDQAQYGLTDEVHQLEATIAALKQKLAQAQDALDALCKHLARLQADIACKANSMLLDTKCMDTRRKLTVPAERFVPEVDTFTRTTNSTLSPLKSCQLELA

SEQ ID NO: 1014 - protein, 659 aa, Homo Sapiens
MKKDVRILLVGEPRVGKTSLIMSLVSEEFPEEVPPRAEEITIPADVTPERVPTHIVDYSEAEQSDEQLHQEISQANVICIVYAVNNKHSIDKVTSRWIPLINERTDKDSRLPLILVGNKSDLVEYSSMETILPIMNQYTEIETCVECSAKNLKNISELFYYAQKAVLHPTGPLYCPEEKEMKPACIKALTRIFKISDQDNDGTLNDAELNFFQRICFNTPLAPQALEDVKNVVRKHISDGVADSGLTLKGFLFLHTLFIQRGRHETTWTVLRRFGYDDDLDLTPEYLFPLLKIPPDCTTELNHHAYLFLQSTFDKHDLDRDCALSPDELKDLFKVFPYIPWGPDVNNTVCTNERGWITYQGFLSQWTLTTYLDVQRCLEYLGYLGYSILTEQESQASAVTVTRDKKIDLQKKQTQRNVFRCNVIGVKNCGKSGVLQALLGRNLMRQKKIREDHKSYYAINTVYVYGQEKYLLLHDISESEFLTEAEIICDVVCLVYDVSNPKSFEYCARIFKQHFMDSRIPCLIVAAKSDLHEVKQEYSISPTDFCRKHKMPPPQAFTCNTADAPSKDIFVKLTTMAMYPHARLRCMCTCNRCTFCICQNFLNSDLLQSVKNKIFTAVLNRHVTQADLKSSTFWLRASFGATVFAVLGFAMYKALLKQR

SEQ ID NO: 1015 - protein, 247 aa, Homo Sapiens
MAADTPGKPSASPMAGAPASASRTPDKPRSAAEHRKVGSRPGVRGATGGREGRGTQPVPDPQSSKPVMEKRRRARINESLAQLKTLILDALRKESSRHSKLEKADILEMTVRHLRSLRRVQVTAALSADPAVLGKYRAGFHECLAEVNRFLAGCEGVPADVRSRLLGHLAACLRQLGPSRRPASLSPAAPAEAPAPEVYAGRPLLPSLGGPFPLLAPPLLPGLTRALPAAPRAGPQGPGGPWRPWLR

SEQ ID NO: 1016 - protein, 590 aa, Homo Sapiens
MSSACDAGDHYPLHLLVWKNDYRQLEKELQGQNVEAVDPRGRTLLHLAVSLGHLESARVLLRHKADVTKENRQGWTVLHEAVSTGDPEMVYTVLQHRDYHNTSMALEGVPELLQKILEAPDFYVQMKWEFTSWVPLVSRICPNDVCRIWKSGAKLRVDITLLGFENMSWIRGRRSFIFKGEDNWAELMEVNHDDKVVTTERFDLSQEMERLTLDLMKPKSREVERRLTSPVINTSLDTKNIAFERTKSGFWGWRTDKAEVVNGYEAKVYTVNNVNVITKIRTEHLTEEEKKRYKADRNPLESLLGTVEHQFGAQGDLTTECATANNPTAITPDEYFNEEFDLKDRDIGRPKELTIRTQKFKAMLWMCEEFPLSLVEQVIPIIDLMARTSAHFARLRDFIKLEFPPGFPVKIEIPLFHVLNARITFGNVNGCSTAEESVSQNVEGTQADSASHITNFEVDQSVFEIPESYYVQDNGRNVHLQDEDYEIMQFAIQQSLLESSRSQELSGPASNGGISQTNTYDAQYERAIQESLLTSTEGLCPSALSETSRFDNDLQLAMELSAKELEEWELRLQEEEAELQQVLQLSLTDK

SEQ ID NO: 1017 - protein, 727 aa, Homo Sapiens
MAFQKAVKGTILVGGGALATVLGLSQFAHYRRKQMNLAYVKAADCISEPVNREPPSREAQLLTLQNTSEFDILVIGGGATGSGCALDAVTRGLKTALVERDDFSSGTSSRSTKLIHGGVRYLQKAIMKLDIEQYRMVKEALHERANLLEIAPHLSAPLPIMLPVYKWWQLPYYWVGIKLYDLVAGSNCLKSSYVLSKSRALEHFPMLQKDKLVGAIVYYDGQHNDARMNLAIALTAARYGAATANYMEVVSLLKKTDPQTGKVRVSGARCKDVLTGQEFDVRAKCVINATGPFTDSVRKMDDKDAAAICQPSAGVHIVMPGYYSPESMGLLDPATSDGRVIFFLPWQKMTIAGTTDTPTDVTHHPIPSEEDINFILNEVRNYLSCDVEVRRGDVLAAWSGIRPLVTDPKSADTQSISRNHVVDISESGLITIAGGKWTTYRSMAEDTINAAVKTHNLKAGPSRTVGLFLQGGKDWSPTLYIRLVQDYGLESEVAQHLAATYGDKAFEVAKMASVTGKRWPIVGVRLVSEFPYIEAEVKYGIKEYACTAVDMISRRTRLAFLNVQAAEEALPRIVELMGRELNWDDYKKQEQLETARKFLYYEMGYKSRSEQLTDRSEISLLPSDIDRYKKRFHKFDADQKGFITIVDVQRVLESINVQMDENTLHEILNEVDLNKNGQVELNEFLQLMSAIQKGRVSGSRLAILMKTAEENLDRRVPIPVDRSCGGL

SEQ ID NO: 1018 - protein, 329 aa, Homo Sapiens
MVSKSRWKLLAMLALVLVVMVWYSISREDSFYFPIPEKKEPCLQGEAESKASKLFGNYSRDQPIFLRLEDYFWVKTPSAYELPYGTKGSEDLLLRVLAITSSSIPKNIQSLRCRRCVVVGNGHRLRNSSLGDAINKYDVVIRLNNAPVAGYEGDVGSKTTMRLFYPESAHFDPKVENNPDTLLVLVAFKAMDFHWIETILSDKKRVRKGFWKQPPLIWDVNPKQIRILNPFFMEIAADKLLSLPMQQPRKIKQKPTTGLLAITLALHLCDLVHIAGFGYPDAYNKKQTIHYYEQITLKSMAGSGHNVSQEALAIKRMLEMGAIKNLTSF

SEQ ID NO: 1019 - protein, 326 aa, Homo Sapiens
MDYSHQTSLVPCGQDKYISKNELLLHLKTYNLYYEGQNLQLRHREEEDEFIVEGLLNISWGLRRPIRLQMQDDNERIRPPPSSSSWHSGCNLGAQGTTLKPLTVPKVQISEVDAPPEGDQMPSSTDSRGLKPLQEDTPQLMRTRSDVGVRRRGNVRTPSDQRRIRRHRFSINGHFYNHKTSVFTPAYGSVTNVRINSTMTTPQVLKLLLNKFKIENSAEEFALYVVHTSGEKQKLKATDYPLIARILQGPCEQISKVFLMEKDQVEEVTYDVAQYIKFEMPVLKSFIQKLQEEEDREVKKLMRKYTVLRLMIRQRLEEIAETPATI

SEQ ID NO: 1020 - protein, 639 aa, Homo Sapiens
MGGHFWPPEPYTVFMWGSPWEADSPRVKLRGREKGRQTEGGAFPLVSSALSGDPRFFSPTTPPAEPIVVRLKEVRLQRDDFEILKVIGRGAFSEVAVVKMKQTGQVYAMKIMNKWDMLKRGEVSCFREERDVLVNGDRRWITQLHFAFQDENYLYLVMEYYVGGDLLTLLSKFGERIPAEMARFYLAEIVMAIDSVHRLGYVHRDIKPDNILLDRCGHIRLADFGSCLKLRADGTVRSLVAVGTPDYLSPEILQAVGGGPGTGSYGPECDWWALGVFAYEMFYGQTPFYADSTAETYGKIVHYKEHLSLPLVDEGVPEEARDFIQRLLCPPETRLGRGGAGDFRTHPFFFGLDWDGLRDSVPPFTPDFEGATDTCNFDLVEDGLTAMVSGGGETLSDIREGAPLGVHLPFVGYSYSCMALRDSEVPGPTPMELEAEQLLEPHVQAPSLEPSVSPQDETAEVAVPAAVPAAEAEAEVTLRELQEALEEEVLTRQSLSREMEAIRTDNQNFASQLREAEARNRDLEAHVRQLQERMELLQAEGATAVTGVPSPRATDPPSHLDGPPAVAVGQCPLVGPGPMHRRHLLLPARVPRPGLSEALSLLLFAVVLSRAAALGCIGLVAHAGQLTAVWRRPGAARAP

SEQ ID NO: 1021 - protein, 1445 aa, Homo Sapiens
MRRLLEPCWWILFLKITSSVLHYVVCFPALTEGYVGALHENRHGSAVQIRRRKASGDPYWAYSGAYGPEHWVTSSVSCGGRHQSPIDILDQYARVGEEYQELQLDGFDNESSNKTWMKNTGKTVAILLKDDYFVSGAGLPGRFKAEKVEFHWGHSNGSAGSEHSINGRRFPVEMQIFFYNPDDFDSFQTAISENRIIGAMAIFFQVSPRDNSALDPIIHGLKGVVHHEKETFLDPFVLRDLLPASLGSYYRYTGSLTTPPCSEIVEWIVFRRPVPISYHQLEAFYSIFTTEQQDHVKSVEYLRNNFRPQQRLHDRVVSKSAVRDSWNHDMTDFLENPLGTEASKVCSSPPIHMKVQPLNQTALQVSWSQPETIYHPPIMNYMISYSWTKNEDEKEKTFTKDSDKDLKATISHVSPDSLYLFRVQAVCRNDMRSDFSQTMLFQANTTRIFQGTRIVKTGVPTASPASSADMAPISSGSSTWTSSGIPFSFVSMATGMGPSSSGSQATVASVVTSTLLAGLGFGGGGISSFPSTVWPTRLPTAASASKQAARPVLATTEALASPGPDGDSSPTKDGEGTEEGEKDEKSESEDGEREHEEDGEKDSEKKEKSGVTHAAEERNQTEPSPTPSSPNRTAEGGHQTIPGHEQDHTAVPTDQTGGRRDAGPGLDPDMVTSTQVPPTATEEQYAGSDPKRPEMPSKKPMSRGDRFSEDSRFITVNPAEKNTSGMISRPAPGRMEWIIPLIVVSALTFVCLILLIAVLVYWRGCNKIKSKGFPRRFREVPSSGERGEKGSRKCFQTAHFYVEDSSSPRVVPNESIPIIPIPDDMEAIPVKQFVKHIGELYSNNQHGFSEDFEEVQRCTADMNITAEHSNHPENKHKNRYINILAYDHSRVKLRPLPGKDSKHSDYINANYVDGYNKAKAYIATQGPLKSTFEDFWRMIWEQNTGIIVMITNLVEKGRRKCDQYWPTENSEEYGNIIVTLKSTKIHACYTVRRFSIRNTKVKKGQKGNPKGRQNERVVIQYHYTQWPDMGVPEYALPVLTFVRRSSAARMPETGPVLVHCSAGVGRTGTYIVIDSMLQQIKDKSTVNVLGFLKHIRTQRNYLVQTEEQYIFIHDALLEAILGKETEVSSNQLHSYVNSILIPGVGGKTRLEKQFKLVTQCNAKYVECFSAQKECNKEKNRNSSVVPSERARVGLAPLPGMKGTDYINASYIMGYYRSNEFIITQHPLPHTTKDFWRMIWDHNAQIIVMLPDNQSLAEDEFVYWPSREESMNCEAFTVTLISKDRLCLSNEEQIIIHDFILEATQDDYVLEVRHFQCPKWPNPDAPISSTFELINVIKEEALTRDGPTIVHDEYGAVSAGMLCALTTLSQQLENENAVDVFQVAKMINLMRPGVFTDIEQYQFIYKAMLSLVSTKENGNGPMTVDKNGAVLIADESDPAESMESLV

SEQ ID NO: 1022 - protein, 1052 aa, Homo Sapiens
MKLVNIWLLLLVVLLCGKKHLGDRLEKKSFEKAPCPGCSHLTLKVEFSSTVVEYEYIVAFNGYFTAKARNSFISSALKSSEVDNWRIIPRNNPSSDYPSDFEVIQIKEKQKAGLLTLEDHPNIKRVTPQRKVFRSLKYAESDPTVPCNETRWSQKWQSSRPLRRASLSLGSGFWHATGRHSSRRLLRAIPRQVAQTLQADVLWQMGYTGANVRVAVFDTGLSEKHPHFKNVKERTNWTNERTLDDGLGHGTFVAGVIASMRECQGFAPDAELHIFRVFTNNQVSYTSWFLDAFNYAILKKIDVLNLSIGGPDFMDHPFVDKVWELTANNVIMVSAIGNDGPLYGTLNNPADQMDVIGVGGIDFEDNIARFSSRGMTTWELPGGYGRMKPDIVTYGAGVRGSGVKGGCRALSGTSVASPVVAGAVTLLVSTVQKRELVNPASMKQALIASARRLPGVNMFEQGHGKLDLLRAYQILNSYKPQASLSPSYIDLTECPYMWPYCSQPIYYGGMPTVVNVTILNGMGVTGRIVDKPDWQPYLPQNGDNIEVAFSYSSVLWPWSGYLAISISVTKKAASWEGIAQGHVMITVASPAETESKNGAEQTSTVKLPIKVKIIPTPPRSKRVLWDQYHNLRYPPGYFPRDNLRMKNDPLDWNGDHIHTNFRDMYQHLRSMGYFVEVLGAPFTCFDASQYGTLLMVDSEEEYFPEEIAKLRRDVDNGLSLVIFSDWYNTSVMRKVKFYDENTRQWWMPDTGGANIPALNELLSVWNMGFSDGLYEGEFTLANHDMYYASGCSIAKFPEDGVVITQTFKDQGLEVLKQETAVVENVPILGLYQIPAEGGGRIVLYGDSNCLDDSHRQKDCFWLLDALLQYTSYGVTPPSLSHSGNRQRPPSGAGSVTPERMEGNHLHRYSKVLEAHLGDPKPRPLPACPRLSWAKPQPLNETAPSNLWKHQKLLSIDLDKVVLPNFRSNRPQVRPLSPGESGAWDIPGGIMPGRYNQEVGQTIPVFAFLGAMVVLAFFVVQINKAKSRPKRRKPRVKRPQLMQQVHPPKTPSV

SEQ ID NO: 1023 - protein, 556 aa, Homo Sapiens
MAVAAAAAAGPVFWRRLLGLLPGRPGLAALLGRLSDRLGRNRDRQRRRSPWLLLAPLLSPAVPQVTSPPCCLCPEGVHRFQWIRNLVPEFGVSSSHVRVLSSPAEFFELMKGQIRVAKRRVVMASLYLGTGPLEQELVDCLESTLEKSLQAKFPSNLKVSILLDFTRGSRGRKNSRTMLLPLLRRFPEQVRVSLFHTPHLRGLLRLLIPERFNETIGLQHIKVYLFDNSVILSGANLSDSYFTNRQDRYVFLQDCAEIADFFTELVDAVGDVSLQLQGDDTVQVVDGMVHPYKGDRAEYCKAANKRVMDVINSARTRQQMLHAQTFHSNSLLTQEDAAAAGDRRPAPDTWIYPLIQMKPFEIQIDEIVTETLLTEAERGAKVYLTTGYFNLTQAYMDLVLGTRAEYQILLASPEVNGFFGAKGVAGAIPAAYVHIERQFFSEVCSLGQQERVQLQEYWRRGWTFHAKGLWLYLAGSSLPCLTLIGSPNFGYRSVHRDLEAQIAIVTENQALQQQLHQEQEQLYLRSGVVSSATFEQPSRQVKLWVKMVTPLIKNFF

SEQ ID NO: 1024 - protein, 211 aa, Homo Sapiens
MTTLTRQDLNFGQVVADVLCEFLEVAVHLILYVREVYPVGIFQKRKKYNVPVQMSCHPELNQYIQDTLHCVKPLLEKNDVEKVVVVILDKEHRPVEKFVFEITQPPLLSISSDSLLSHVEQLLRAFILKISVCDAVLDHNPPGCTFTVLVHTREAATRNMEKIQVIKDFPWILADEQDVHMHDPRLIPLKTMTSDILKMQLYVEERAHKGS

SEQ ID NO: 1025 - protein, 84 aa, Homo Sapiens
MPLARDLLHPSLEEEKKKHKKKRLVQSPNSYFMDVKCPGCYKITTVFSHAQTVVLCVGCSTVLCQPTGGKARLTEGCSFRRKQH

SEQ ID NO: 1026 - protein, 991 aa, Homo Sapiens
MHSPGADGTQVSPGAHYCSPTGAGCPRPCADTPGPQPQPMDLRVGQRPPVEPPPEPTLLALQRPQRLHHHLFLAGLQQQRSVEPMRLSMDTPMPELQVGPQEQELRQLLHKDKSKRSAVASSVVKQKLAEVILKKQQAALERTVHPNSPGIPYRTLEPLETEGATRSMLSSFLPPVPSLPSDPPEHFPLRKTVSEPNLKLRYKPKKSLERRKNPLLRKESAPPSLRRRPAETLGDSSPSSSSTPASGCSSPNDSEHGPNPILGSEALLGQRLRLQETSVAPFALPTVSLLPAITLGLPAPARADSDRRTHPTLGPRGPILGSPHTPLFLPHGLEPEAGGTLPSRLQPILLLDPSGSHAPLLTVPGLGPLPFHFAQSLMTTERLSGSGLHWPLSRTRSEPLPPSATAPPPPGPMQPRLEQLKTHVQVIKRSAKPSEKPRLRQIPSAEDLETDGGGPGQVVDDGLEHRELGHGQPEARGPAPLQQHPQVLLWEQQRLAGRLPRGSTGDTVLLPLAQGGHRPLSRAQSSPAAPASLSAPEPASQARVLSSSETPARTLPFTTGLIYDSVMLKHQCSCGDNSRHPEHAGRIQSIWSRLQERGLRSQCECLRGRKASLEELQSVHSERHVLLYGTNPLSRLKLDNGKLAGLLAQRMFVMLPCGGVGVDTDTIWNELHSSNAARWAAGSVTDLAFKVASRELKNGFAVVRPPGHHADHSTAMGFCFFNSVAIACRQLQQQSKASKILIVDWDVHHGNGTQQTFYQDPSVLYISLHRHDDGNFFPGSGAVDEVGAGSGEGFNVNVAWAGGLDPPMGDPEYLAAFRIVVMPIAREFSPDLVLVSAGFDAAEGHPAPLGGYHVSAKCFGYMTQQLMNLAGGAVVLALEGGHDLTAICDASEACVAALLGNRVDPLSEEGWKQKPNLNAIRSLEAVIRVHSKYWGCMQRLASCPDSWVPRVPGADKEEVEAVTALASLSVGILAEDRPSEQLVEEEEPMNL

SEQ ID NO: 1027 - protein, 463 aa, Homo Sapiens
MAQGLVTFADVAIDFSQEEWACLNSAQRDLYWDVMLENYSNLVSLDLESAYENKSLPTEKNIHEIRASKRNSDRRSKSLGRNWICEGTLERPQRSRGRYVNQMIINYVKRPATREGTPPRTHQRHHKENSFECKDCGKAFSRGYQLSQHQKIHTGEKPYECKECKKAFRWGNQLTQHQKIHTGEKPYECKDCGKAFRWGSSLVIHKRIHTGEKPYECKDCGKAFRRGDELTQHQRFHTGEKDYECKDCGKTFSRVYKLIQHKRIHSGEKPYECKDCGKAFICGSSLIQHKRIHTGEKPYECQECGKAFTRVNYLTQHQKIHTGEKPHECKECGKAFRWGSSLVKHERIHTGEKPYKCTECGKAFNCGYHLTQHERIHTGETPYKCKECGKAFIYGSSLVKHERIHTGVKPYGCTECGKSFSHGHQLTQHQKTHSGAKSYECKECGKACNHLNHLREHQRIHNS

SEQ ID NO: 1028 - protein, 1227 aa, Homo Sapiens
MAAVLESLLREEVSVAAVVRWIARSTQGSEDNAGEAAALSSLRALRKEFVPFLLNFLREQSSRVLPQGPPTPAKTPGASAALPGRPGGPPRGSRGARSQLFPPTEAQSTAAEAPLARRGGRRRGPGPARERGGRGLEEGVSGESLPGAGGRRLRGSGSPSRPSLTLSDPPNLSNLEEFPPVGSVPPGPTGTKPSRRINPTPVSEERSLSKPKTCFTSPPISCVPSSQPSALDTSPWGLGLPPGCRSLQEEREMLRKERSKQLQQSPTPTCPTPELGSPLPSRTGSLTDEPADPARVSSRQRLELVALVYSSCIAENLVPNLFLELFFVFQLLTARRMVTAKDSDPELSPAVLDSLESPLFQSIHDCVFFAVQVLECHFQVLSNLDKGTLKLLAENERLLCFSPALQGRLRAAYEGSVAKVSLVMPPSTQAVSFQPETDNRANFSSDRAFHTFKKQRDVFYEVLREWEDHHEEPGWDFEKGLGSRIRAMMGQLSAACSHSHFVRLFQKQLLQMCQSPGGAGGTVLGEAPDVLSMLGADKLGRLWRLQERLMAPQSSGGPCPPPTFPGCQGFFRDFILSASSFQFNQHLMDSLSLKIQELNGLALPQHEPNDEDGESDVDWQGERKQFAVVLLSLRLLAKFLGFVAFLPYRGPEPPPTGELQDSILALRSQVPPVLDVRTLLQRGLQARRAVLTVPWLVEFLSFADHVVPLLEYYRDIFTLLLRLHRSLVLSQESEGKMCFLNKLLLLAVLGWLFQIPTVPEDLFFLEEGPSYAFEVDTVAPEHGLDNAPVVDQQLLYTCCPYIGELRKLLASWVSGSSGRSGGFMRKITPTTTTSLGAQPSQTSQGLQAQLAQAFFHNQPPSLRRTVEFVAERIGSNCVKHIKATLVADLVRQAESLLQEQLVTQGEEGGDPAQLLEILCSQLCPHGAQALALGREFCQRKSPGAVRALLPEETPAAVLSSAENIAVGLATEKACAWLSANITALIRREVKAAVSRTLRAQGPEPAARGERRGCSRACEHHAPLPSHLISEIKDVLSLAVGPRDPDEGVSPEHLEQLLGQLGQTLRCRQFLCPPAEQHLAKCSVELASLLVADQIPILGPPAQYRLERGQARRLLHMLLSLWKEDFQGPVPLQLLLSPRNVGLLADTRPREWDLLLFLLRELVEKGLMGRMEIEACLGSLHQAQWPGDFAEELATLSNLFLAEPHLPEPQLRACELVQPNRGTVLAQS

SEQ ID NO: 1029 - protein, 153 aa, Homo Sapiens
MGAPLLSPGWGAGAAGRRWWMLLAPLLPALLLVRPAGALVEGLYCGTRDCYEVLGVSRSAGKAEIARAYRQLARRYHPDRYRPQPGDEGPGRTPQSAEEAFLLVATAYETLKVSQAAAELQQYCMQNACKDALLVGVPAGSNPFREPRSCALL

SEQ ID NO: 1030 - protein, 367 aa, Homo Sapiens
MSSTLAKIAEIEAEMARTQKNKATAHHLGLLKARLAKLRRELITPKGGGGGGPGEGFDVAKTGDARIGFVGFPSVGKSTLLSNLAGVYSEVAAYEFTTLTTVPGVIRYKGAKIQLLDLPGIIEGAKDGKGRGRQVIAVARTCNLILIVLDVLKPLGHKKIIENELEGFGIRLNSKPPNIGFKKKDKGGINLTATCPQSELDAETVKSILAEYKIHNADVTLRSDATADDLIDVVEGNRVYIPCIYVLNKIDQISIEELDIIYKVPHCVPISAHHRWNFDDLLEKIWDYLKLVRIYTKPKGQLPDYTSPVVLPYSRTTVEDFCMKIHKNLIKEFKYALVWGLSVKHNPQKVGKDHTLEDEDVIQIVKK

SEQ ID NO: 1031 - protein, 685 aa, Homo Sapiens
MDVCVRLALWLLWGLLLHQGQSLSHSHSEKATGTSSGANSEESTAAEFCRIDKPLCHSEDEKLSFEAVRNIHKLMDDDANGDVDVEESDEFLREDLNYHDPTVKHSTFHGEDKLISVEDLWKAWKSSEVYNWTVDEVVQWLITYVELPQYEETFRKLQLSGHAMPRLAVTNTTMTGTVLKMTDRSHRQKLQLKALDTVLFGPPLLTRHNHLKDFMLVVSIVIGVGGCWFAYIQNRYSKEHMKKMMKDLEGLHRAEQSLHDLQERLHKAQEEHRTVEVEKVHLEKKLRDEINLAKQEAQRLKELREGTENERSRQKYAEEELEQVREALRKAEKELESHSSWYAPEALQKWLQLTHEVEVQYYNIKKQNAEKQLLVAKEGAEKIKKKRNTLFGTFHVAHSSSLDDVDHKILTAKQALSEVTAALRERLHRWQQIEILCGFQIVNNPGIHSLVAALNIDPSWMGSTRPNPAHFIMTDDVDDMDEEIVSPLSMQSPSLQSSVRQRLTEPQHGLGSQRDLTHSDSESSLHMSDRQRVAPKPPQMSRAADEALNAMTSNGSHRLIEGVHPGSLVEKLPDSPALAKKALLALNHGLDKAHSLMELSPSAPPGGSPHLDSSRSHSPSSPDPDTPSPVGDSRALQASRNTRIPHLAGKKAVAEEDNGSIGEETDSSPGRKKFPLKIFKKPLKK

SEQ ID NO: 1032 - protein, 346 aa, Homo Sapiens
MAASQAVEEMRSRVVLGEFGVRNVHTTDFPGNYSGYDDAWDQDRFEKNFRVDVVHMDENSLEFDMVGIDAAIANAFRRILLAEVPTMAVEKVLVYNNTSIVQDEILAHRLGLIPIHADPRLFEYRNQGDEEGTEIDTLQFRLQVRCTRNPHAAKDSSDPNELYVNHKVYTRHMTWIPLGNQADLFPEGTIRPVHDDILIAQLRPGQEIDLLMHCVKGIGKDHAKFSPVATASYRLLPDITLLEPVEGEAAEELSRCFSPGVIEVQEVQGKKVARVANPRLDTFSREIFRNEKLKKVVRLARVRDHYIFSVESTGVLPPDVLVSEAIKVLMGKCRRFLDELDAVQMD

SEQ ID NO: 1033 - protein, 767 aa, Homo Sapiens
MATYLEFIQQNEERDGVRFSWNVWPSSRLEATRMVVPLACLLTPLKERPDLPPVQYEPVLCSRPTCKAVLNPLCQVDYRAKLWACNFCFQRNQFPPAYGGISEVNQPAELMPQFSTIEYVIQRGAQSPLIFLYVVDTCLEEDDLQALKESLQMSLSLLPPDALVGLITFGRMVQVHELSCEGISKSYVFRGTKDLTAKQIQDMLGLTKPAMPMQQARPAQPQEHPFASSRFLQPVHKIDMNLTDLLGELQRDPWPVTQGKRPLRSTGVALSIAVGLLEGTFPNTGARIMLFTGGPPTQGPGMVVGDELKIPIRSWHDIEKDNARFMKKATKHYEMLANRTAANGHCIDIYACALDQTGLLEMKCCANLTGGYMVMGDSFNTSLFKQTFQRIFTKDFNGDFRMAFGATLDVKTSRELKIAGAIGPCVSLNVKGPCVSENELGVGGTSQWKICGLDPTSTLGIYFEVVNQHNTPIPQGGRGAIQFVTHYQHSSTQRRIRVTTIARNWADVQSQLRHIEAAFDQEAAAVLMARLGVFRAESEEGPDVLRWLDRQLIRLCQKFGQYNKEDPTSFRLSDSFSLYPQFMFHLRRSPFLQVFNNSPDESSYYRHHFARQDLTQSLIMIQPILYSYSFHGPPEPVLLDSSSILADRILLMDTFFQIVIYLGETIAQWRKAGYQDMPEYENFKHLLQAPLDDAQEILQARFPMPRYINTEHGGSQARFLLSKVNPSQTHNNLYAWGQETGAPILTDDVSLQVFMDHLKKLAVSSAC

SEQ ID NO: 1034 - protein, 510 aa, Homo Sapiens
MDGFYDQQVPFMVPGKSRSEECRGRPVIDRKRKFLDTDLAHDSEELFQDLSQLQEAWLAEAQVPDDEQFVPDFQSDNLVLHAPPPTKIKRELHSPSSELSSCSHEQALGANYGEKCLYNYCAYDRKPPSGFKPLTPPTTPLSPTHQNPLFPPPQATLPTSGHAPAAGPVQGVGPAPAPHSLPEPGPQQQTFAVPRPPHQPLQMPKMMPENQYPSEQRFQRQLSEPCHPFPPQPGVPGDNRPSYHRQMSEPIVPAAPPPPQGFKQEYHDPLYEHGVPGMPGPPAHGFQSPMGIKQEPRDYCVDSEVPNCQSSYMRGGYFSSSHEGFSYEKDPRLYFDDTCVVPERLEGKVKQEPTMYREGPPYQRRGSLQLWQFLVTLLDDPANAHFIAWTGRGMEFKLIEPEEVARRWGIQKNRPAMNYDKLSRSLRYYYEKGIMQKVAGERYVYKFVCDPDALFSMAFPDNQRPFLKAESECHLSEEDTLPLTHFEDSPAYLLDMDRCSSLPYAEGFAY

SEQ ID NO: 1035 - protein, 426 aa, Homo Sapiens
MPLLWLRGFLLASCWIIVRSSPTPGSEGHSAAPDCPSCALAALPKDVPNSQPEMVEAVKKHILNMLHLKKRPDVTQPVPKAALLNAIRKLHVGKVGENGYVEIEDDIGRRAEMNELMEQTSEIITFAESGTARKTLHFEISKEGSDLSVVERAEVWLFLKVPKANRTRTKVTIRLFQQQKHPQGSLDTGEEAEEVGLKGERSELLLSEKVVDARKSTWHVFPVSSSIQRLLDQGKSSLDVRIACEQCQESGASLVLLGKKKKKEEEGEGKKKGGGEGGAGADEEKEQSHRPFLMLQARQSEDHPHRRRRRGLECDGKVNICCKKQFFVSFKDIGWNDWIIAPSGYHANYCEGECPSHIAGTSGSSLSFHSTVINHYRMRGHSPFANLKSCCVPTKLRPMSMLYYDDGQNIIKKDIQNMIVEECGCS

SEQ ID NO: 1036 - protein, 700 aa, Homo Sapiens
MSRRTRCEDLDELHYQDTDSDVPEQRDSKCKVKWTHEEDEQLRALVRQFGQQDWKFLASHFPNRTDQQCQYRWLRVLNPDLVKGPWTKEEDQKVIELVKKYGTKQWTLIAKHLKGRLGKQCRERWHNHLNPEVKKSCWTEEEDRIICEAHKVLGNRWAEIAKMLPGRTDNAVKNHWNSTIKRKVDTGGFLSESKDCKPPVYLLLELEDKDGLQSAQPTEGQGSLLTNWPSVPPTIKEEENSEEELAAATTSKEQEPIGTDLDAVRTPEPLEEFPKREDQEGSPPETSLPYKWVVEAANLLIPAVGSSLSEALDLIESDPDAWCDLSKFDLPEEPSAEDSINNSLVQLQASHQQQVLPPRQPSALVPSVTEYRLDGHTISDLSRSSRGELIPISPSTEVGGSGIGTPPSVLKRQRKRRVALSPVTENSTSLSFLDSCNSLTPKSTPVKTLPFSPSQFLNFWNKQDTLELESPSLTSTPVCSQKVVVTTPLHRDKTPLHQKHAAFVTPDQKYSMDNTPHTPTPFKNALEKYGPLKPLPQTPHLEEDLKEVLRSEAGIELIIEDDIRPEKQKRKPGLRRSPIKKVRKSLALDIVDEDVKLMMSTLPKSLSLPTTAPSNSSSLTLSGIKEDNSLLNQGFLQAKPEKAAVAQKPRSHFTTPAPMSSAWKTVACGGTRDQLFMQEKARQLLGRLKPSHTSRTLILS

SEQ ID NO: 1037 - protein, 514 aa, Homo Sapiens
MARLTKRRQADTKAIQHLWAAIEIIRNQKQIANIDRITKYMSRVHGMHPKETTRQLSLAVKDGLIVETLTVGCKGSKAGIEQEGYWLPGDEISIKKKNTNKQEMGTYLRFIVSRMKERAIDLNKKGKDNKHPMYRRLVHSAVDVPTIQEKVNEGKYRSYEEFKADAQLLLHNTVIFYGADSEQADIARMLYKDTCHELDELQLCKNCFYLSNARPDNWFCYPCIPNHELVWAKMKGFGFWPAKVMQKEDNQVDVRFFGHHHQRAWIPSENIQDITVNIHRLHVKRSMGWKKACDELELHQRFLREGRFWKSKNEDRGEEEAESSISSTSNEQLKVTQEPRAKKGRRNQSVEPKKEEPEPETEAVSSSQEIPTMPQPIEKVSVSTQTKKLSASSPRMLHRSTQTTNDGVCQSMCHDKYTKIFNDFKDRMKSDHKRETERVVREALEKLRSEMEEEKRQAVNKAVANMQGEMDRKCKQVKEKCKEEFVEEIKKLATQHKQLISQTKKKQWVNTSLF

SEQ ID NO: 1038 - protein, 369 aa, Homo Sapiens
MADSAQAQKLVYLVTGGCGFLGEHVVRMLLQREPRLGELRVFDQHLGPWLEELKTGPVRVTAIQGDVTQAHEVAAAVAGAHVVIHTAGLVDVFGRASPKTIHEVNVQGTRNVIEACVQTGTRFLVYTSSMEVVGPNTKGHPFYRGNEDTPYEAVHRHPYPCSKALAEWLVLEANGRKVRGGLPLVTCALRPTGIYGEGHQIMRDFYRQGLRLGGWLFRAIPASVEHGRVYVGNVAWMHVLAARELEQRATLMGGQVYFCYDGSPYRSYEDFNMEFLGPCGLRLVGARPLLPYWLLVFLAALNALLQWLLRPLVLYAPLLNPYTLAVANTTFTVSTDKAQRHFGYEPLFSWEDSRTRTILWVQAATGSAQ

SEQ ID NO: 1039 - protein, 427 aa, Homo Sapiens
MAPKKRPETQKTSEIVLRPRNKRSRSPLELEPEAKKLCAKGSGPSRRCDSDCLWVGLAGPQILPPCRSIVRTLHQHKLGRASWPSVQQGLQQSFLHTLDSYRILQKAAPFDRRATSLAWHPTHPSTVAVGSKGGDIMLWNFGIKDKPTFIKGIGAGGSITGLKFNPLNTNQFYASSMEGTTRLQDFKGNILRVFASSDTINIWFCSLDVSASSRMVVTGDNVGNVILLNMDGKELWNLRMHKKKVTHVALNPCCDWFLATASVDQTVKIWDLRQVRGKASFLYSLPHRHPVNAACFSPDGARLLTTDQKSEIRVYSASQWDCPLGLIPHPHRHFQHLTPIKAAWHPRYNLIVVGRYPDPNFKSCTPYELRTIDVFDGNSGKMMCQLYDPESSGISSLNEFNPMGDTLASAMGYHILIWSQEEARTRK

SEQ ID NO: 1040 - protein, 248 aa, Homo Sapiens
MAGITTIEAVKRKIQVLQQQADDAEERAERLQREVEGERRAREQAEAEVASLNRRIQLVEEELDRAQERLATALQKLEEAEKAADESERGMKVIENRALKDEEKMELQEIQLKEAKHIAEEADRKYEEVARKLVIIEGDLERTEERAELAESRCREMDEQIRLMDQNLKCLSAAEEKYSQKEDKYEEEIKILTDKLKEAETRAEFAERSVAKLEKTIDDLEDKLKCTKEEHLCTQRMLDQTLLDLNEM

SEQ ID NO: 1041 - protein, 1832 aa, Homo Sapiens
MEDTPPSLSCSDCQRHFPSLPELSRHRELLHPSPNQDSEEADSIPRPYRCQQCGRGYRHPGSLVNHRRTHETGLFPCTTCGKDFSNPMALKSHMRTHAPEGRRRHRPPRPKEATPHLQGETVSTDSWGQRLGSSEGWENQTKHTEETPDCESVPDPRAASGTWEDLPTRQREGLASHPGPEDGADGWGPSTNSARAPPLPIPASSLLSNLEQYLAESVVNFTGGQEPTQSPPAEEERRYKCSQCGKTYKHAGSLTNHRQSHTLGIYPCAICFKEFSNLMALKNHSRLHAQYRPYHCPHCPRVFRLPRELLEHQQSHEGERQEPRWEEKGMPTTNGHTDESSQDQLPSAQMLNGSAELSTSGELEDSGLEEYRPFRCGDCGRTYRHAGSLINHRKSHQTGVYPCSLCSKQLFNAAALKNHVRAHHRPRQGVGENGQPSVPPAPLLLAETTHKEEEDPTTTLDHRPYKCSECGRAYRHRGSLVNHRHSHRTGEYQCSLCPRKYPNLMALRNHVRVHCKAARRSADIGAEGAPSHLKVELPPDPVEAEAAPHTDQDHVCKHEEEATDITPAADKTAAHICSICGLLFEDAESLERHGLTHGAGEKENSRTETTMSPPRAFACRDCGKSYRHSGSLINHRQTHQTGDFSCGACAKHFHTMAAMKNHLRRHSRRRSRRHRKRAGGASGGREAKLLAAESWTRELEDNEGLESPQDPSGESPHGAEGNLESDGDCLQAESEGDKCGLERDETHFQGDKESGGTGEGLERKDASLLDNLDIPGEEGGGTHFCDSLTGVDEDQKPATGQPNSSSHSANAVTGWQAGAAHTCSDCGHSFPHATGLLSHRPCHPPGIYQCSLCPKEFDSLPALRSHFQNHRPGEATSAQPFLCCLCGMIFPGRAGYRLHRRQAHSSSGMTEGSEEEGEEEGVAEAAPARSPPLQLSEAELLNQLQREVEALDSAGYGHICGCCGQTYDDLGSLERHHQSQSSGTTADKAPSPLGVAGDAMEMVVDSVLEDIVNSVSGEGGDAKSQEGAGTPLGDSLCIQGGESLLEAQPRPFRCNQCGKTYRHGGSLVNHRKIHQTGDFLCPVCSRCYPNLAAYRNHLRNHPRCKGSEPQVGPIPEAAGSSELQVGPIPEGGSNKPQHMAEEGPGQAEVEKLQEELKVEPLEEVARVKEEVWEETTVKGEEIEPRLETAEKGCQTEASSERPFSCEVCGRSYKHAGSLINHRQSHQTGHFGCQACSKGFSNLMSLKNHRRIHADPRRFRCSECGKAFRLRKQLASHQRVHMERRGGGGTRKATREDRPFRCGQCGRTYRHAGSLLNHRRSHETGQYSCPTCPKTYSNRMALKDHQRLHSENRRRRAGRSRRTAVRCALCGRSFPGRGSLERHLREHEETEREPANGQGGLDGTAASEANLTGSQGLETQLGGAEPVPHLEDGVPRPGERSQSPIRAASSEAPEPLSWGAGKAGGWPVGGGLGNHSGGWVPQFLTRSEEPEDSVHRSPCHAGDCQLNGPTLSHMDSWDNRDNSSQLQPGSHSSCSQCGKTYCQSGSLLNHNTNKTDRHYCLLCSKEFLNPVATKSHSHNHIDAQTFACPDCGKAFESHQELASHLQAHARGHSQVPAQMEEARDPKAGTGEDQVVLPGQGKAQEAPSETPRGPGESVERARGGQAVTSMAAEDKERPFRCTQCGRSYRHAGSLLNHQKAHTTGLYPCSLCPKLLPNLLSLKNHSRTHTDPKRHCCSICGKAFRTAARLEGHGRVHAPREGPFTCPHCPRHFRRRISFVQHQQQHQEEWTVAGSGAPVAPVTGRGDLPLPPPPTPTTPLLDPSPQWPADLSFSL

SEQ ID NO: 1042 - protein, 1356 aa, Homo Sapiens
MDLKEKHLGEPPSALGLSTRKALSVLKEQLEAVLEGHLRERKKCLTWKEVWRSSFLHHSNRCSCFHWPGASLMLLAVLLLLGCCGGQPAGSRGVGLVNASALFLLLLLNLVLIGRQDRLKRREVERRLRGIIDQIQDALRDGREIQWPSAMYPDLHMPFAPSWSLHWAYRDGHLVNLPVSLLVEGDIIALRPGQESFASLRGIKDDEHIVLEPGDLFPPFSPPPSPRGEVERGPQSPQQHRLFRVLETPVIDNIRWCLDMALSRPVTALDNERFTVQSVMLHYAVPVVLAGFLITNALRFIFSAPGVTSWQYTLLQLQVNGVLPILPLLFPVLWVLATACGEARVLAQMSKASPSSLLAKFSEDTLSSYTEAVSSQEMLRCIWGHFLRVLGGTSPTLSHSSSLLHSLGSVTVLCCVDKQGILSWPNPSPETVLFFSGKVEPPHSSHEDLTDGLSTRSFCHPEPHERDALLAGSLNNTLHLSNEQERGDWPGEAPKPPEPYSHHKAHGRSKHPSGSNVSFSRDTEGGEEEPSKTQPGMESDPYEAEDFVCDYHLEMLSLSQDQQNPSCIQFDDSNWQLHLTSLKPLGLNVLLNLCDASVTERLCRFSDHLCNIALQESHSAVLPVHVPWGLCELARLIGFTPGAKELFKQENHLALYRLPSAETMKETSLGRLSCVTKRRPPLSHMISLFIKDTTTSTEQMLSHGTADVVLEACTDFWDGADIYPLSGSDRKKVLDFYQRACLSGYCSAFAYKPMNCALSSQLNGKCIELVQVPGQSSIFTMCELPSTIPIKQNARRSSWSSDEGIGEVLEKEDCMQALSGQIFMGMVSSQYQARLDIVRLIDGLVNACIRFVYFSLEDELKSKVFAEKMGLETGWNCHISLTPNGDMPGSEIPPSSPSHAGSLHDDLNQVSRDDAEGLLLMEEEGHSDLISFQPTDSDIPSFLEDSNRAKLPRGIHQVRPHLQNIDNVPLLVPLFTDCTPETMCEMIKIMQEYGEVTCCLGSSANLRNSCLFLQSDISIALDPLYPSRCSWETFGYATSISMAQASDGLSPLQLSGQLNSLPCSLTFRQEETISIIRLIEQARHATYGIRKCFLFLLQCQLTLVVIQFLSCLVQLPPLLSTTDILWLSCFCYPLLSISLLGKPPHSSIMSMATGKNLQSIPKKTQHYFLLCFLLKFSLTISSCLICFGFTLQSFCDSSRDRNLTNCSSVMLPSNDDRAPAWFEDFANGLLSAQKLTAALIVLHTVFISITHVHRTKPLWRKSPLTNLWWAVTVPVVLLGQVVQTAVDLQLWTHRDSHVHFGLEDVPLLTWLLGCLSLVLVVVTNEIVKLHEIRVRVRYQKRQKLQFETKLGMNSPF

SEQ ID NO: 1043 - protein, 207 aa, Homo Sapiens
MENRALDPGTRDSYGATSHLPNKGALAKVKNNFKDLMSKLTEGQYVLCRWTDGLYYLGKIKRVSSSKQSCLVTFEDNSKYWVLWKDIQHAGVPGEEPKCNICLGKTSGPLNEILICGKCGLGYHQQCHIPIAGSADQPLLTPWFCRRCIFALAVRVSLPSSPVPASPASSSGADQRLPSQSLSSKQKGHTWALETDSASATVLGQDL

SEQ ID NO: 1044 - protein, 1336 aa, Homo Sapiens
MAPRCPWPWPRRRRLLDVLAPLVLLLGVRAASAEPERISEEVGLLQLLGDPPPQQVTQTDDPDVGLAYVFGPDANSGQVARYHFPSLFFRDFSLLFHIRPATEGPGVLFAITDSAQAMVLLGVKLSGVQDGHQDISLLYTEPGAGQTHTAASFRLPAFVGQWTHLALSVAGGFVALYVDCEEFQRMPLARSSRGLELEPGAGLFVAQAGGADPDKFQGVIAELKVRRDPQVSPMHCLDEEGDDSDGASGDSGSGLGDARELLREETGAALKPRLPAPPPVTTPPLAGGSSTEDSRSEEVEEQTTVASLGAQTLPGSDSVSTWDGSVRTPGGRVKEGGLKGQKGEPGVPGPPGRAGPPGSPCLPGPPGLPCPVSPLGPAGPALQTVPGPQGPPGPPGRDGTPGRDGEPGDPGEDGKPGDTGPQGFPGTPGDVGPKGDKGDPGVGERGPPGPQGPPGPPGPSFRHDKLTFIDMEGSGFGGDLEALRGPRGFPGPPGPPGVPGLPGEPGRFGVNSSDVPGPAGLPGVPGREGPPGFPGLPGPPGPPGREGPPGRTGQKGSLGEAGAPGHKGSKGAPGPAGARGESGLAGAPGPAGPPGPPGPPGPPGPGLPAGFDDMEGSGGPFWSTARSADGPQGPPGLPGLKGDPGVPGLPGAKGEVGADGVPGFPGLPGREGIAGPQGPKGDRGSRGEKGDPGKDGVGQPGLPGPPGPPGPVVYVSEQDGSVLSVPGPEGRPGFAGFPGPAGPKGNLGSKGERGSPGPKGEKGEPGSIFSPDGGALGPAQKGAKGEPGFRGPPGPYGRPGYKGEIGFPGRPGRPGMNGLKGEKGEPGDASLGFGMRGMPGPPGPPGPPGPPGTPVYDSNVFAESSRPGPPGLPGNQGPPGPKGAKGEVGPPGPPGQFPFDFLQLEAEMKGEKGDRGDAGQKGERGEPGGGGFFGSSLPGPPGPPGPRGYPGIPGPKGESIRGQPGPPGPQGPPGIGYEGRQGPPGPPGPPGPPSFPGPHRQTISVPGPPGPPGPPGPPGTMGASSGVRLWATRQAMLGQVHEVPEGWLIFVAEQEELYVRVQNGFRKVQLEARTPLPRGTDNEVAALQPPVVQLHDSNPYPRREHPHPTARPWRADDILASPPRLPEPQPYPGAPHHSSYVHLRPARPTSPPAHSHRDFQPVLHLVALNSPLSGGMRGIRGADFQCFQQARAVGLAGTFRAFLSSRLQDLYSIVRRADRAAVPIVNLKDELLFPSWEALFSGSEGPLKPGARIFSFDGKDVLRHPTWPQKSVWHGSDPNGRRLTESYCETWRTEAPSATGQASSLLGGRLLGQSAASCHHAYIVLCIENSFMTASK

SEQ ID NO: 1045 - protein, 329 aa, Homo Sapiens
MWGLKVLLLPVVSFALYPEEILDTHWELWKKTHRKQYNNKVDEISRRLIWEKNLKYISIHNLEASLGVHTYELAMNHLGDMTSEEVVQKMTGLKVPLSHSRSNDTLYIPEWEGRAPDSVDYRKKGYVTPVKNQGQCGSCWAFSSVGALEGQLKKKTGKLLNLSPQNLVDCVSENDGCGGGYMTNAFQYVQKNRGIDSEDAYPYVGQEESCMYNPTGKAAKCRGYREIPEGNEKALKRAVARVGPVSVAIDASLTSFQFYSKGVYYDESCNSDNLNHAVLAVGYGIQKGNKHWIIKNSWGENWGNKGYILMARNKNNACGIANLASFPKM

SEQ ID NO: 1046 - protein, 1788 aa, Homo Sapiens
MKRKERIARRLEGIENDTQPILLQSCTGLVTHRLLEEDTPRYMRASDPASPHIGRSNEEEETSDSSLEKQTRSKYCTETSGVHGDSPYGSGTMDTHSLESKAERIARYKAERRRQLAEKYGLTLDPEADSEYLSRYTKSRKEPDAVEKRGGKSDKQEESSRDASSLYPGTETMGLRTCAGESKDYALHVGDGSSDPEVLLNIENQRRGQELSATRQAHDLSPAAESSSTFSFSGRDSSFTEVPRSPKHAHSSSLQQAASRSPSFGDPQLSPEARPRCTSHSETPTVDDEEKVDERAKLSVAAKRLLFREMEKSFDEQNVPKRRSRNTAVEQRLRRLQDRSLTQPITTEEVVIAATLQASAHQKALAKDQTNEGKELAEQGEPDSSTLSLAEKLALFNKLSQPVSKAISTRNRIDTRQRRMNARYQTQPVTLGEVEQVQSGKLIPFSPAVNTSVSTVASTVAPMYAGDLRTKPPLDHNASATDYKFSSSIENSDSPVRSILKSQAWQPLVEGSENKGMLREYGETESKRALTGRDSGMEKYGSFEEAEASYPILNRAREGDSHKESKYAVPRRGSLERANPPITHLGDEPKEFSMAKMNAQGNLDLRDRLPFEEKVEVENVMKRKFSLRAAEFGEPTSEQTGTAAGKTIAQTTAPVSWKPQDSSEQPQEKLCKNPCAMFAAGEIKTPTGEGLLDSPSKTMSIKERLALLKKSGEEDWRNRLSRRQEGGKAPASSLHTQEAGRSLIKKRVTESRESQMTIEERKQLITVREEAWKTRGRGAANDSTQFTVAGRMVKKGLASPTAITPVASPICGKTRGTTPVSKPLEDIEARPDMQLESDLKLDRLETFLRRLNNKVGGMHETVLTVTGKSVKEVMKPDDDETFAKFYRSVDYNMPRSPVEMDEDFDVIFDPYAPKLTSSVAEHKRAVRPKRRVQASKNPLKMLAAREDLLQEYTEQRLNVAFMESKRMKVEKMSSNSNFSEVTLAGLASKENFSNVSLRSVNLTEQNSNNSAVPYKRLMLLQIKGRRHVQTRLVEPRASALNSGDCFLLLSPHCCFLWVGEFANVIEKAKASELATLIQTKRELGCRATYIQTIEEGINTHTHAAKDFWKLLGGQTSYQSAGDPKEDELYEAAIIETNCIYRLMDDKLVPDDDYWGKIPKCSLLQPKEVLVFDFGSEVYVWHGKEVTLAQRKIAFQLAKHLWNGTFDYENCDINPLDPGECNPLIPRKGQGRPDWAIFGRLTEHNETILFKEKFLDWTELKRSNEKNPGELAQHKEDPRTDVKAYDVTRMVSMPQTTAGTILDGVNVGRGYGLVEGHDRRQFEITSVSVDVWHILEFDYSRLPKQSIGQFHEGDAYVVKWKFMVSTAVGSRQKGEHSVRAAGKEKCVYFFWQGRHSTVSEKGTSALMTVELDEERGAQVQVLQGKEPPCFLQCFQGGMVVHSGRREEEEENVQSEWRLYCVRGEVPVEGNLLEVACHCSSLRSRTSMVVLNVNKALIYLWHGCKAQAHTKEVGRTAANKIKEQCPLEAGLHSSSKVTIHECDEGSEPLGFWDALGRRDRKAYDCMLQDPGSFNFAPRLFILSSSSGDFAATEFVYPARAPSVVSSMPFLQEDLYSAPQPALFLVDNHHEVYLWQGWWPIENKITGSARIRWASDRKSAMETVLQYCKGKNLKKPAPKSYLIHAGLEPLTFTNMFPSWEHREDIAEITEMDTEVSNQITLVEDVLAKLCKTIYPLADLLARPLPEGVDPLKLEIYLTDEDFEFALDMTRDEYNALPAWKQVNLKKAKGLF

SEQ ID NO: 1047 - protein, 589 aa, Homo Sapiens
MEAEETMECLQEFPEHHKMILDRLNEQREQDRFTDITLIVDGHHFKAHKAVLAACSKFFYKFFQEFTQEPLVEIEGVSKMAFRHLIEFTYTAKLMIQGEEEANDVWKAAEFLQMLEAIKALEVRNKENSAPLEENTTGKNEAKKRKIAETSNVITESLPSAESEPVEIEVEIAEGTIEVEDEGIETLEEVASAKQSVKYIQSTGSSDDSALALLADITSKYRQGDRKGQIKEDGCPSDPTSKQEHMKSHSTESFKCEICNKRYLRESAWKQHLNCYHLEEGGVSKKQRTGKKIHVCQYCEKQFDHFGHFKEHLRKHTGEKPFECPNCHERFARNSTLKCHLTACQTGVGAKKGRKKLYECQVCNSVFNSWDQFKDHLVIHTGDKPNHCTLCDLWFMQGNELRRHLSDAHNISERLVTEEVLSVETRVQTEPVTSMTIIEQVGKVHVLPLLQVQVDSAQVTVEQVHPDLLQDSQVHDSHMSELPEQVQVSYLEVGRIQTEEGTEVHVEELHVERVNQMPVEVQTELLEADLDHVTPEIMNQEERESSQADAAEAAREDHEDAEDLETKPTVDSEAEKAENEDRTALPVLE

SEQ ID NO: 1048 - protein, 709 aa, Homo Sapiens
MKRCRSDELQQQQGEEDGAGLEDAASHLPGADLRPGETTGANSAGGPTSDAGAAAAPNPGPRSKPPDLKKIQQLSEGSMFGHGLKHLFHSRRRSREREHQTSQDSQQHQQQQGMSDHDSPDEKERSPEMHRVSYAMSLHDLPARPTAFNRVLQQIRSRPSIKRGASLHSSSGGGSSGSSSRRTKSSSLEPQRGSPHLLRKAPQDSSLAAILHQHQCRPRSSSTTDTALLLADGSNVYLLAEEAEGIGDKVDKGDLVALSLPAGHGDTDGPISLDVPDGAPDPQRTKAAIDHLHQKILKITEQIKIEQEARDDNVAEYLKLANNADKQQVSRIKQVFEKKNQKSAQTIAQLHKKLEHYRRRLKEIEQNGPSRQPKDVLRDMQQGLKDVGANVRAGISGFGGGVVEGVKGSLSGLSQATHTAVVSKPREFASLIRNKFGSADNIAHLKDPLEDGPPEEAARALSGSATLVSSPKYGSDDECSSASASSAGAGSNSGAGPGGALGSPKSNALYGAPGNLDALLEELREIKEGQSHLEDSMEDLKTQLQRDYTYMTQCLQEERYRYERLEEQLNDLTELHQNEMTNLKQELASMEEKVAYQSYERARDIQEAVESCLTRVTKLELQQQQQQVVQLEGVENANARALLGKFINVILALMAVLLVFVSTIANFITPLMKTRLRITSTTLLVLVLFLLWKHWDSLTYLLEHVLLPS

SEQ ID NO: 1049 - protein, 561 aa, Homo Sapiens
MAIATSTQLARALYDNTAESPQELSFRRGDVLRVLQREGAGGLDGWCLCSLHGQQGIVPANRVKLLPAGPAPKPSLSPASPAQPGSPYPAPDHSNEDQEVYVVPPPARPCPTSGPPAGPCPPSPDLIYKIPRASGTQLAAPRDALEVYDVPPTALRVPSSGPYDCPASFSHPLTRVAPQPPGEDDAPYDVPLTPKPPAELEPDLEWEGGREPGPPIYAAPSNLKRASALLNLYEAPEELLADGEGGGTDEGIYDVPLLGPEAPPSPEPPGALASHDQDTLAQLLARSPPPPHRPRLPSAESLSRRPLPALPVPEAPSPSPVPSPAPGRKGSIQDRPLPPPPPRLPGYGGPKVEGDPEGREMEDDPAGHHNEYEGIPMAEEYDYVHLKGMDKAQGSRPPDQACTGDPELPERGMPAPQEALSPGEPLVVSTGDLQLLYFYAGQCQSHYSALQAAVAALMSSTQANQPPRLFVPHSKRVVVAAHRLVFVGDTLGRLAASAPLRAQVRAAGTALGQALRATVLAVKGAALGYPSSPAIQEMVQCVTELAGQALQFTTLLTSLAP

SEQ ID NO: 1050 - protein, 480 aa, Homo Sapiens
MTVTKMSWRPQYRSSKFRNVYGKVANREHCFDGIPITKNVHDNHFCAVNTRFLAIVTESAGGGSFLVIPLEQTGRIEPNYPKVCGHQGNVLDIKWNPFIDNIIASCSEDTSVRIWEIPEGGLKRNMTEALLELHGHSRRVGLVEWHPTTNNILFSAGYDYKVLIWNLDVGEPVKMIDCHTDVILCMSFNTDGSLLTTTCKDKKLRVIEPRSGRVLQEANCKNHRVNRVVFLGNMKRLLTTGVSRWNTRQIALWDQEDLSMPLIEEEIDGLSGLLFPFYDADTHMLYLAGKGDGNIRYYEISTEKPYLSYLMEFRSPAPQKGLGVMPKHGLDVSACEVFRFYKLVTLKGLIEPISMIVPRRSDSYQEDIYPMTPGTEPALTPDEWLGGINRDPVLMSLKEGYKKSSKMVFKAPIKEKKSVVVNGIDLLENVPPRTENELLRMFFRQQDEIRRLKEELAQKDIRIRQLQLELKNLRNSPKNC

SEQ ID NO: 1051 - protein, 229 aa, Homo Sapiens
MAEDKTKPSELDQGKYDADDNVKIICLGDSAVGKSKLMERFLMDGFQPQQLSTYALTLYKHTATVDGRTILVDFWDTAGQERFQSMHASYYHKAHACIMVFDVQRKVTYRNLSTWYTELREFRPEIPCIVVANKIDADINVTQKSFNFAKKFSLPLYFVSAADGTNVVKLFNDAIRLAVSYKQNSQDFMDEIFQELENFSLEQEEEDVPDQEQSSSIETPSEEAASPHS

SEQ ID NO: 1052 - protein, 3036 aa, Homo Sapiens
MHLHQVLTGAVNPGDNCYSVGSVGDVPFTAYGSGCDIVILANDFECVQIIPGAKHGNIQVSCVECSNQQGRIAASYGNAVCIFEPLGINSHKRNCQLKCQWLKTGQFFLSSVTYNLAWDPQDNRLLTATDSIQLWAPPGDDILEEEEEIDNTVPPVLNDWKCVWQCKTSVSVHLMEWSPDGEYFATAGKDDCLLKVWYPMTGWKSSIIPQDHHEVKRRQSSTQFSFVYLAHPRAVTGFSWRKTSKYMPRGSVCNVLLTSCHDGVCRLWAETLLPEDCLLGEQICETTTSSIASSLSHAGRHKDRIQHALETIHHLKNLRKGQRRSSVLVTHAELMPDQTAMHEVQRHISHHANALCHFHIAASINPATDIPNVLVGTAFNVDDGNGGFVVHWLNNKEFHFTSSTEVFMHQLRKLSDKQVDHENDDADREDEEHSQEDRERGLHMKLDHDLSLDRESEAGTGSSEHEDGEREGSPRTYSRLSVPMPLPTVLLDRKIETLLTEWNKNPDMLFTIHPVDGTFLVWHVKYLDEYNPGIFRQVQVSFSSRIPVAFPSGDASSLSKNIMMYACINATKDSHHTLLHQEGMSVGSPHGSQPHSRSHSTHMNILAPTVMMISKHIDGSLNQWAVTFADKSAFTTVLTVSHKFRYCGHRFHLNDLACHSVLPLLLTSSHHNALLTPELDCQWDSDNKLSRLMDPVKHIKGSSKQPLRNAATRTFHDPNAIYSELILWRVDPIGPLSYTGGVSELARINSLHTSAFSNVAWLPTLIPSYCLGTYCNSASACFVASDGKNLRLYQAVVDARKLLDELSDPESSKLIGEVFNIVSQQSTARPGCIIELDAITNQCGSNTQLLHVFQEDFIIGYKPHKEDMEKKETEIFFQPSQGYRPPPFSEKFFLVVIEKDSNNNSILHMWHLHLKSVQACLAKASEGASSESLLSVPGQKNVDSSPETSPSVSPMPHSSSIANLQTASKLILSSRLVYSQPLDLPESVEVIRATPSAGHLSSSSIYPVCLAPYLVVTTCSDNKVRFWKCCMEANPECNKSDEKEIYHWKRWPLMNDEGEDNSSTVSIVGRPVAVSCSYTGRLAVAYKQPIHHNGFVSKEFSMHVCIFECESTGGSEWVLEQTIHLDDLVKVGSVLDSRVSVDSNLFVYSKSDALLSKDRYLIPNIKHLVHLDWVSKEDGSHILTVGVGANIFMYGRLSGIVTEQTNSKDGVAVITLPLGGSIKQGVKSRWVLLRSIDLVSSVDGTPSLPVSLSWVRDGILVVGMDCEMHVYAQWKHAVKFGDTEADSSNAEEAAMQDHSTFKSNMLARKSVVEGTAISDDVFCSPTVIQDGGLFEAAHVLSPTLPQYHPTQLLELMDLGKVRRAKAILSHLVKCIAGEVAIVRDPDAGEGTKRHLSRTISVSGSTAKETVTVGKDGTRDYTEIDSIPPLPLYALLAADQDTSYRISEESTKIPQSYEDQTVSQPEDQYSELFQIQDIPTDDIDLEPEKRENKSKVINLSQYGPAYFGQEHARVLSSHLMHSSLPGLTRLEQMFLVALADTVATTSTELDESRDKSCSGRDTLDECGLRYLLAMRLHTCLLTSLPPLYRVQLLHQGVSTCHFAWAFHSEAEEELINMIPAIQRGDPQWSELRAMGIGWWVRNINTLRRCIEKVAKASFQRNNDALDAALFYLSMKKKAVVWGLFRSQHDEKMTTFFSHNFNEDRWRKAALKNAFSLLGKQRFEQSAAFFLLAGSLKDAIEVCLEKMEDIQLAMVIARLYESEFETSSTYISILNQKILGCQKDGSGFSCKRLHPDPFLRSLAYWVMKDYTRALDTLLEQTPKEDDEHQVIIKSCNPVAFSFYNYLRTHPLLIRRNLASPEGTLATLGLKTEKNFVDKINLIERKLFFTTANAHFKVGCPVLALEVLSKIPKVTKTSALSAKKDQPDFISHRMDDVPSHSKALSDGNGSSGIEWSNVTSSQYDWSQPIVKVDEEPLNLDWGEDHDSALDEEEDDAVGLVMKSTDAREKDKQSDQKASDPNMLLTPQEEDDPEGDTEVDVIAEQLKFRACLKILMTELRTLATGYEVDGGKLRFQLYNWLEKEIAALHEICNHESVIKEYSSKTYSKVESDLLDQEEMVDKPDIGSYERHQIERRRLQAKREHAERRKSWLQKNQDLLRVFLSYCSLHGAQGGGLASVRMELKFLLQESQQETTVKQLQSPLPLPTTLPLLSASIASTKTVIANPVLYLNNHIHDILYTIVQMKTPPHPSIEDVKVHTLHSLAASLSASIYQALCDSHSYSQTEGNQFTGMAYQGLLLSDRRRLRTESIEEHATPNSSPAQWPGVSSLINLLSSAQDEDQPKLNILLCEAVVAVYLSLLIHALATNSSSELFRLAAHPLNNRMWAAVFGGGVKLVVKPRRQSENISAPPVLSEDIDKHRRRFNMRMLVPGRPVKDATPPPVPAERPSYKEKFIPPELSMWDYFVAKPFLPLSDSGVIYDSDESIHSDEEDDAFFSDTQIQEHQDPNSYSWALLHLTMVKLALHNVKNFFPIAGLEFSELPVTSPLGIAVIKNLENWEQILQEKMDQFEGPPPNYINTYPTDLSVGAGPAILRNKAMLEPENTPFKSRDSSAFPVKRLWHFLVKQEVLQETFIRYIFTKKRKQSEVEADLGYPGGKAKVIHKESDMIMAFSVNKANCNEIVLASTHDVQELDVTSLLACQSYIWIGEEYDRESKSSDDVDYRGSTTTLYQPSATSYSASQVHPPSSLPWLGTGQTSTGASVLMKRNLHNVKRMTSHPVHQYYLTGAQDGSVRMFEWTRPQQLVCFRQAGNARVTRLYFNSQGNKCGVADGEGFLSIWQVNQTASNPKPYMSWQCHSKATSDFAFITSSSLVATSGHSNDNRNVCLWDTLISPGNSLIHGFTCHDHGATVLQYAPKQQLLISGGRKGHVCIFDIRQRQLIHTFQAHDSAIKALALDPYEEYFTTGSAEGNIKVWRLTGHGLIHSFKSEHAKQSIFRNIGAGVMQIDIIQGNRLFSCGADGTLKTRVLPNAFNIPNRILDIL

SEQ ID NO: 1053 - protein, 1175 aa, Homo Sapiens
MSADSSPLVGSTPTGYGTLTIGTSIDPLSSSVSSVRLSGYCGSPWRVIGYHVVVWMMAGIPLLLFRWKPLWGVRLRLRPCNLAHAETLVIEIRDKEDSSWQLFTVQVQTEAIGEGSLEPSPQSQAEDGRSQAAVGAVPEGAWKDTAQLHKSEEAKRVLRYYLFQGQRYIWIETQQAFYQVSLLDHGRSCDDVHRSRHGLSLQDQMVRKAIYGPNVISIPVKSYPQLLVDEALNPYYGFQAFSIALWLADHYYWYALCIFLISSISICLSLYKTRKQSQTLRDMVKLSMRVCVCRPGGEEEWVDSSELVPGDCLVLPQEGGLMPCDAALVAGECMVNESSLTGESIPVLKTALPEGLGPYCAETHRRHTLFCGTLILQARAYVGPHVLAVVTRTGFCTAKGGLVSSILHPRPINFKFYKHSMKFVAALSVLALLGTIYSIFILYRNRVPLNEIVIRALDLVTVVVPPALPAAMTVCTLYAQSRLRRQGIFCIHPLRINLGGKLQLVCFDKTGTLTEDGLDVMGVVPLKGQAFLPLVPEPRRLPVGPLLRALATCHALSRLQDTPVGDPMDLKMVESTGWVLEEEPAADSAFGTQVLAVMRPPLWEPQLQAMEEPPVPVSVLHRFPFSSALQRMSVVVAWPGATQPEAYVKGSPELVAGLCNPETVPTDFAQMLQSYTAAGYRVVALASKPLPTVPSLEAAQQLTRDTVEGDLSLLGLLVMRNLLKPQTTPVIQALRRTRIRAVMVTGDNLQTAVTVARGCGMVAPQEHLIIVHATHPERGQPASLEFLPMESPTAVNGVKDPDQAASYTVEPDPRSRHLALSGPTFGIIVKHFPKLLPKVLVQGTVFARMAPEQKTELVCELQKLQYCVGMCGDGANDCGALKAADVGISLSQAEASVVSPFTSSMASIECVPMVIREGRCSLDTSFSVFKYMALYSLTQFISVLILYTINTNLGDLQFLAIDLVITTTVAVLMSRTGPALVLGRVRPPGALLSVPVLSSLLLQMVLVTGVQLGGYFLTLAQPWFVPLNRTVAAPDNLPNYENTVVFSLSSFQYLILAAAVSKGAPFRRPLYTNVPFLVALALLSSVLVGLVLVPGLLQGPLALRNITDTGFKLLLLGLVTLNFVGAFMLESVLDQCLPACLRRLRPKRASKKRFKQLERELAEQPWPPLPAGPLR

SEQ ID NO: 1054 - protein, 417 aa, Homo Sapiens
MESNLSGLVPAAGLVPALPPAVTLGLTAAYTTLYALLFFSVYAQLWLVLLYGHKRLSYQTVFLALCLLWAALRTTLFSFYFRDTPRANRLGPLPFWLLYCCPVCLQFFTLTLMNLYFAQVVFKAKVKRRPEMSRGLLAVRGAFVGASLLFLLVNVLCAVLSHRRRAQPWALLLVRVLVSDSLFVICALSLAACLCLVARRAPSTSIYLEAKGTSVCQAAAMGGAMVLLYASRACYNLTALALAPQSRLDTFDYDWYNVSDQADLVNDLGNKGYLVFGLILFVWELLPTTLLVGFFRVHRPPQDLSTSHILNGQVFASRSYFFDRAGHCEDEGCSWEHSRGESTRCQDQAATTTVSTPPHRRDPPPSPTEYPGPSPPHPRPLCQVCLPLLAQDPGGRGYPLLWPAPCCSCHSELVPSP

SEQ ID NO: 1055 - protein, 132 aa, Homo Sapiens
MDVFQEGLAMVVQDPLLCDLPIQVTLEEVNSQIALEYGQAMTVRVCKMDGEVMPVVVVQSATVLDLKKAIQRYVQLKQEREGGIQHISWSYVWRTYHLTSAGEKLTEDRKKLRDYGIRNRDEVSFIKKLRQK

SEQ ID NO: 1056 - protein, 669 aa, Homo Sapiens
MAIVQTLPVPLEPAPEAATAPQAPVMGSVSSLISGRPCPGGPAPPRHHGPPGPTFFRQQDGLLRGGYEAQEPLCPAVPPRKAVPVTSFTYINEDFRTESPPSPSSDVEDAREQRAHNAHLRGPPPKLIPVSGKLEKNMEKILIRPTAFKPVLPKPRGAPSLPSFMGPRATGLSGSQGSLTQLFGGPASSSSSSSSSSAADKPLAFSGWASGCPSGTLSDSGRNSLSSLPTYSTGGAEPTTSSPGGHLPSHGSGRGALPGPARGVPTGPSHSDSGRSSSSKSTGSLGGRVAGGLLGSGTRASPDSSSCGERSPPPPPPPPSDEALLHCVLEGKLRDREAELQQLRDSLDENEATMCQAYEERQRHWQREREALREDCAAQAQRAQRAQQLLQLQVFQLQQEKRQLQDDFAQLLQEREQLERRCATLEREQRELGPRLEETKWEVCQKSGEISLLKQQLKESQAELVQKGSELVALRVALREARATLRVSEGRARGLQEAARARELELEACSQELQRHRQEAEQLREKAGQLDAEAAGLREPPVPPATADPFLLAESDEAKVQRAAAGVGGSLRAQVERLRVELQRERRRGEEQRDSFEGERLAWQAEKEQVIRYQKQLQHNYIQMYRRNRQLEQELQQLSLELEARELADLGLAEQAPCICLEEITATEI

SEQ ID NO: 1057 - protein, 421 aa, Homo Sapiens
MNRGFSRKSHTFLPKIFFRKMSSSGAKDKPELQFPFLQDEDTVATLLECKTLFILRGLPGSGKSTLARVIVDKYRDGTKMVSADAYKITPGARGAFSEEYKRLDEDLAAYCRRRDIRILVLDDTNHERERLEQLFEMADQYQYQVVLVEPKTAWRLDCAQLKEKNQWQLSADDLKKLKPGLEKDFLPLYFGWFLTKKSSETLRKAGQVFLEELGNHKAFKKELRQFVPGDEPREKMDLVTYFGKRPPGVLHCTTKFCDYGKAPGAEEYAQQDVLKKSYSKAFTLTISALFVTPKTTGARVELSEQQLQLWPSDVDKLSPTDNLPRGSRAHITLGCAADVEAVQTGLDLLEILRQEKGGSRGEEVGELSRGKLYSLGNGRWMLTLAKNMEVRAIFTGYYGKGKPVPTQGSRKGGALQSCTII

SEQ ID NO: 1058 - protein, 291 aa, Homo Sapiens
MDPSLLRERELFKKRALSTPVVEKRSASSESSSSSSKKKKTKVEHGGSSGSKQNSDHSNGSFNLKALSGSSGYKFGVLAKIVNYMKTRHQRGDTHPLTLDEILDETQHLDIGLKQKQWLMTEALVNNPKIEVIDGKYAFKPKYNVRDKKALLRLLDQHDQRGLGGILLEDIEEALPNSQKAVKALGDQILFVNRPDKKKILFFNDKSCQFSVDEEFQKLWRSVTVDSMDEEKIEEYLKRQGISSMQESGPKKVAPIQRRKKPASQKKRRFKTHNEHLAGVLKDYSDITSSK

SEQ ID NO: 1059 - protein, 1107 aa, Homo Sapiens
MDGKRRPGPGPGVPPKRARGGLWDDDDAPRPSQFEEDLALMEEMEAEHRLQEQEEEELQSVLEGVADGQVPPSAIDPRWLRPTPPALDPQTEPLIFQQLEIDHYVGPAQPVPGGPPPSRGSVPVLRAFGVTDEGFSVCCHIHGFAPYFYTPAPPGFGPEHMGDLQRELNLAISRDSRGGRELTGPAVLAVELCSRESMFGYHGHGPSPFLRITVALPRLVAPARRLLEQGIRVAGLGTPSFAPYEANVDFEIRFMVDTDIVGCNWLELPAGKYALRLKEKATQCQLEADVLWSDVVSHPPEGPWQRIAPLRVLSFDIECAGRKGIFPEPERDPVIQICSLGLRWGEPEPFLRLALTLRPCAPILGAKVQSYEKEEDLLQAWSTFIRIMDPDVITGYNIQNFDLPYLISRAQTLKVQTFPFLGRVAGLCSNIRDSSFQSKQTGRRDTKVVSMVGRVQMDMLQVLLREYKLRSYTLNAVSFHFLGEQKEDVQHSIITDLQNGNDQTRRRLAVYCLKDAYLPLRLLERLMVLVNAVEMARVTGVPLSYLLSRGQQVKVVSQLLRQAMHEGLLMPVVKSEGGEDYTGATVIEPLKGYYDVPIATLDFSSLYPSIMMAHNLCYTTLLRPGTAQKLGLTEDQFIRTPTGDEFVKTSVRKGLLPQILENLLSARKRAKAELAKETDPLRRQVLDGRQLALKVSANSVYGFTGAQVGKLPCLEISQSVTGFGRQMIEKTKQLVESKYTVENGYSTSAKVVYGDTDSVMCRFGVSSVAEAMALGREAADWVSGHFPSPIRLEFEKVYFPYLLISKKRYAGLLFSSRPDAHDRMDCKGLEAVRRDNCPLVANLVTASLRRLLIDRDPEGAVAHAQDVISDLLCNRIDISQLVITKELTRAASDYAGKQAHVELAERMRKRDPGSAPSLGDRVPYVIISAAKGVAAYMKSEDPLFVLEHSLPIDTQYYLEQQLAKPLLRIFEPILGEGRAEAVLLRGDHTRCKTVLTGKVGGLLAFAKRRNCCIGCRTVLSHQGAVCEFCQPRESELYQKEVSHLNALEERFSRLWTQCQRCQGSLHEDVICTSRDCPIFYMRKKVRKDLEDQEQLLRRFGPPGPEAW

SEQ ID NO: 1060 - protein, 877 aa, Homo Sapiens
MCDLRRPAAGGMMDLAYVCEWEKWSKSTHCPSVPLACAWSCRNLIAFTMDLRSDDQDLTRMIHILDTEHPWDLHSIPSEHHEAITCLEWDQSGSRLLSADADGQIKCWSMADHLANSWESSVGSLVEGDPIVALSWLHNGVKLALHVEKSGASSFGEKFSRVKFSPSLTLFGGKPMEGWIAVTVSGLVTVSLLKPSGQVLTSTESLCRLRGRVALADIAFTGGGNIVVATADGSSASPVQFYKVCVSVVSEKCRIDTEILPSLFMRCTTDLNRKDKFPAITHLKFLARDMSEQVLLCASSQTSSIVECWSLRKEGLPVNNIFQQISPVVGDKQPTILKWRILSATNDLDRVSAVALPKLPISLTNTDLKVASDTQFYPGLGLALAFHDGSVHIVHRLSLQTMAVFYSSAAPRPVDEPAMKRPRTAGPAVHLKAMQLSWTSLALVGIDSHGKLSVLRLSPSMGHPLEVGLALRHLLFLLEYCMVTGYDWWDILLHVQPSMVQSLVEKLHEEYTRQTAALQQVLSTRILAMKASLCKLSPCTVTRVCDYHTKLFLIAISSTLKSLLRPHFLNTPDKSPGDRLTEICTKITDVDIDKVMINLKTEEFVLDMNTLQALQQLLQWVGDFVLYLLASLPNQGSLLRPGHSFLRDGTSLGMLRELMVVIRIWGLLKPSCLPVYTATSDTQDSMSLLFRLLTKLWICCRDEGPASEPDEALVDECCLLPSQLLIPSLDWLPASDGLVSRLQPKQPLRLQFGRAPTLPGSAATLQLDGLARAPGQPKIDHLRRLHLGACPTEECKACTRCGCVTMLKSPNRTTAVKQWEQRWIKNCLAVEGRGPDACVTSRASEEAPAFVQLGPQSTHHSPRTPRSLDHLHPEDRP

SEQ ID NO: 1061 - protein, 1233 aa, Homo Sapiens
MWLSPEEVLVANALWVTERANPFFVLQRRRGHGRGGGLTGLLVGTLDVVLDSSARVAPYRILHQTQDSQVYWTVACGSSRKEITKHWEWLENNLLQTLSIFDSEEDITTFVKGKIHGIIAEENKNLQPQGDEDPGKFKEAELKMRKQFGMPEGEKLVNYYSCSYWKGRVPRQGWLYLTVNHLCFYSFLLGKEVSLVVQWVDITRLEKNATLLFPESIRVDTRDQELFFSMFLNIGETFKLMEQLANLAMRQLLDSEGFLEDKALPRPIRPHRNISALKRDLDARAKNECYRATFRLPRDERLDGHTSCTLWTPFNKLHIPGQMFISNNYICFASKEEDACHLIIPLREVTIVEKADSSSVLPSPLSISTKSKMTFLFANLKDRDFLVQRISDFLQKTPSKQPGSIGSRKASVVDPSTESSPAPQEGSEQPASPASPLSSRQSFCAQEAPTASQGLLKLFQKNSPMEDLGAKGAKEKMKEESWHIHFFEYGRGVCMYRTAKTRALVLKGIPESLRGELWLLFSGAWNEMVTHPGYYAELVEKSTGKYSLATEEIERDLHRSMPEHPAFQNELGIAALRRVLTAYAFRNPTIGYCQAMNIVTSVLLLYGSEEEAFWLLVALCERMLPDYYNTRVVGALVDQGIFEELTRDFLPQLSEKMQDLGVISSISLSWFLTLFLSVMPFESAVVIVDCFFYEGIKVILQVALAVLDANMEQLLGCSDEGEAMTMLGRYLDNVVNKQSVSPPIPHLRALLSSSDDPPAEVDIFELLKVSYEKFSSLRAEDIEQMRFKQRLKVIQSLEDTAKRSVVRAIPVDIGFSIEELEDLYMVFKAKHLASQYWGCSRTMAGRRDPSLPYLEQYRIDASQFRELFASLTPWACGSHTPLLAGRMFRLLDENKDSLINFKEFVTGMSGMYHGDLTEKLKVLYKLHLPPALSPEEAESALEAAHYFTEDSSSEEALPQEEQEGSGSEERGEEKGTSSPDYRHYLRMWAKEKEAQKETIKDLPKMNQEQFIELCKTLYNMFSEDPMEQDLYHAIATVASLLLRIGEVGKKFSARTGRKPRDCATEEDEPPAPELHQDAARELQPPAAGDPQAKAGGDTHLGKAPQESQVVVEGGSGEGQGSPSQLLSDDETKDDMSMSSYSVVSTGSLQCEDLADDTVLVGGEACSPTARIGGTVDTDWCISFEQILASILTESVLVNFFEKRVDIGLKIKDQKKVERQFSTASDHEQPGVSG

SEQ ID NO: 1062 - protein, 772 aa, Homo Sapiens
MAEAHQAVAFQFTVTPDGVDFRLSREALKHVYLSGINSWKKRLIRIKNGILRGVYPGSPTSWLVVIMATVGSSFCNVDISLGLVSCIQRCLPQGCGPYQTPQTRALLSMAIFSTGVWVTGIFFFRQTLKLLLCYHGWMFEMHGKTSNLTRIWAMCIRLLSSRHPMLYSFQTSLPKLPVPRVSATIQRYLESVRPLLDDEEYYRMELLAKEFQDKTAPRLQKYLVLKSWWASNYVSDWWEEYIYLRGRSPLMVNSNYYVMDLVLIKNTDVQAARLGNIIHAMIMYRRKLDREEIKPVMALGIVPMCSYQMERMFNTTRIPGKDTDVLQHLSDSRHVAVYHKGRFFKLWLYEGARLLKPQDLEMQFQRILDDPSPPQPGEEKLAALTAGGRVEWAQARQAFFSSGKNKAALEAIERAAFFVALDEESYSYDPEDEASLSLYGKALLHGNCYNRWFDKSFTLISFKNGQLGLNAEHAWADAPIIGHLWEFVLGTDSFHLGYTETGHCLGKPNPALAPPTRLQWDIPKQCQAVIESSYQVAKALADDVELYCFQFLPFGKGLIKKCRTSPDAFVQIALQLAHFRDRGKFCLTYEASMTRMFREGRTETVRSCTSESTAFVQAMMEGSHTKADLRDLFQKAAKKHQNMYRLAMTGAGIDRHLFCLYLVSKYLGVSSPFLAEVLSEPWRLSTSQIPQSQIRMFDPEQHPNHLGAGGGFGPVADDGYGVSYMIAGENTIFFHISSKFSSSETNAQRFGNHIRKALLDIADLFQVPKAYS

SEQ ID NO: 1063 - protein, 205 aa, Homo Sapiens
MASDHQTQAGKPQSLNPKIIIFEQENFQGHSHELNGPCPNLKETGVEKAGSVLVQAGPWVGYEQANCKGEQFVFEKGEYPRWDSWTSSRRTDSLSSLRPIKVDSQEHKIILYENPNFTGKKMEIIDDDVPSFHAHGYQEKVSSVRVQSGTWVGYQYPGYRGLQYLLEKGDYKDSSDFGAPHPQVQSVRRIRDMQWHQRGAFHPSN

SEQ ID NO: 1064 - protein, 406 aa, Homo Sapiens
MTLDVGPEDELPDWAAAKEFYQKYDPKDVIGRGVSSVVRRCVHRATGHEFAVKIMEVTAERLSPEQLEEVREATRRETHILRQVAGHPHIITLIDSYESSSFMFLVFDLMRKGELFDYLTEKVALSEKETRSIMRSLLEAVSFLHANNIVHRDLKPENILLDDNMQIRLSDFGFSCHLEPGEKLRELCGTPGYLAPEILKCSMDETHPGYGKEVDLWACGVILFTLLAGSPPFWHRRQILMLRMIMEGQYQFSSPEWDDRSSTVKDLISRLLQVDPEARLTAEQALQHPFFERCEGSQPWNLTPRQRFRVAVWTVLAAGRVALSTHRVRPLTKNALLRDPYALRSVRHLIDNCAFRLYGHWVKKGEQQNRAALFQHRPPGPFPIMGPEEEGDSAAITEDEAVLVLG

SEQ ID NO: 1065 - protein, 289 aa, Homo Sapiens
MSGFSTEERAAPFSLEYRVFLKNEKGQYISPFHDIPIYADKDVFHMVVEVPRWSNAKMEIATKDPLNPIKQDVKKGKLRYVANLFPYKGYIWNYGAIPQTWEDPGHNDKHTGCCGDNDPIDVCEIGSKVCARGEIIGVKVLGILAMIDEGETDWKVIAINVDDPDAANYNDINDVKRLKPGYLEATVDWFRRYKVPDGKPENEFAFNAEFKDKDFAIDIIKSTHDHWKALVTKKTNGKGISCMNTTLSESPFKCDPDAARAIVDALPPPCESACTVPTDVDKWFHHQKN

SEQ ID NO: 1066 - protein, 106 aa, Homo Sapiens
MVHIAIKTPLHPATPIPHRAFVPALAFLPFSFSSPLSSLKAVSCFQCDNTMMSFGRICQDRLILSPGCRMCMRQCCQAILFEALCCHNYHQVHTVGKRLTPDFRKC

SEQ ID NO: 1067 - protein, 520 aa, Homo Sapiens
MECPHLSSSVCIAPDSAKFPNGSPSSWCCSVCRSNKSPWVCLTCSSVHCGRYVNGHAKKHYEDAQVPLTNHKKSEKQDKVQHTVCMDCSSYSTYCYRCDDFVVNDTKLGLVQKVREHLQNLENSAFTADRHKKRKLLENSTLNSKLLKVNGSTTAICATGLRNLGNTCFMNAILQSLSNIEQFCCYFKELPAVELRNGKTAGRRTYHTRSQGDNNVSLVEEFRKTLCALWQGSQTAFSPESLFYVVWKIMPNFRGYQQQDAHEFMRYLLDHLHLELQGGFNGVSRSAILQENSTLSASNKCCINGASTVVTAIFGGILQNEVNCLICGTESRKFDPFLDLSLDIPSQFRSKRSKNQENGPVCSLRDCLRSFTDLEELDETELYMCHKCKKKQKSTKKFWIQKLPKVLCLHLKRFHWTAYLRNKVDTYVEFPLRGLDMKCYLLEPENSGPESCLYDLAAVVVHHGSGVGSGHYTAYATHEGRWFHFNDSTVTLTDEETVVKAKAYILFYVEHQAKAGSDKL

SEQ ID NO: 1068 - protein, 242 aa, Homo Sapiens
MLTRKIKLWDINAHITCRLCSGYLIDATTVTECLHTFCRSCLVKYLEENNTCPTCRIVIHQSHPLQYIGHDRTMQDIVYKLVPGLQEAEMRKQREFYHKLGMEVPGDIKGETCSAKQHLDSHRNGETKADDSSNKEAAEEKPEEDNDYHRSDEQVSICLECNSSKLRGLKRKWIRCSAQATVLHLKKFIAKKLNLSSFNELDILCNEEILGKDHTLKFVVVTRWRFKKAPLLLHYRPKMDLL

SEQ ID NO: 1069 - protein, 1522 aa, Homo Sapiens
EPCALTPGPSHLALTFLPSKPGARPQPEGASWDAGPGGAPSAWADPGEGGPSPMLLPEGLSSQALSTEAPLPATLEPRIVMGEETCQALLSPRAARTALRDQEGGHASPDPPPELCSQGDLSVPSPPPDPDSFFTPPSTPTKTTYALLPACGPHGDARDSEAELRDELLDSPPASPSGSYITADGDSWASSPSCSLSLLAPAEGLDFPSGWGLSPQGSMVDERELHPAGTPEPPSSESSLSADSSSSWGQEGHFFDLDFLANDPMIPAALLPFQGSLIFQVEAVEVTPLSPEEEEEEAVADPDPGGDLAGEGEEDSTSASFLQSLSDLSITEGMDEAFAFRDDTSAASSDSDSASYAEADDERLYSGEPHAQATLLQDSVQKTEEESGGGAKGLQAQDGTVSWAVEAAPQTSDRGAYLSQRQELISEVTEEGLALGQESTATVTPHTLQVAPGLQVEVATRVTPQAGEEETDSTAGQESAAMAMPQPSQEGISEILGQESVTAEKLPTPQEETSLTLCPDSPQNLKEEGGLDLPSGRKPVAAATIVPRQAKEDLTLPQDSAMTPPLPLQDTDLSSAPKPVAAATIVSQQAEEGLTLPQDSVMTPPLPLQDTELSSAPKPVAAATLVSQQAEEGLTLPQDSAMTPPLPLQDTDLSSAPKPVAAATLVSQQAEEGLTLPQDSAMTPPLPLQDTDLSSAPKPVAAATLVSQQAEEGLTLPQDSAMTPPLPLQDTDLSSAPKPVAAATIVSQQAEEGLTLPQDSAMTPPLPLQDTDLSSAPKPVAAATIVSQQAEEGLTLPQDSAMTPPLPLQDTDLSSAPKPVAAATPVSQQAEEGLTLPQDSAMTPPLPLQDTDLSSAPKPVAAATPVSQQAEEGLTLPQDSAMTAPLPLQDTGPTSGPEPLAVATPQTLQAEAGCAPGTEPVATMAQQEVGEALGPRPAPEEKNAALPTVPEPAALDQVQQDDPQPAAEAGTPWAAQEDADSTLGMEALSLPEPASGAGEEIAEALSRPGREACLEARAHTGDGAKPDSPQKETLEVENQQEGGLKLLAQEHGPRSALGGAREVPDAPPAACPEVSQARLLSPAREERGLSGKSTPEPTLPSAVATEASLDSCPESSVGAVSSLDRGCPDAPAPTSAPTSQQPEPVLGLGSVEQPHEVPSVLGTPLLQPPENLAKGQPSTPVDRPLGPDPSAPGTLAGAALPPLEPPAPCLCQDPQEDSVEDEEPPGSLGLPPPQAGVQPAAAAVSGTTQPLGTGPRVSLSPHSPLLSPKVASMDAKDLALQILPPCQVPPPSGPQSPAGPQGLSAPEQQEDEDSLEEDSPRALGSGQHSDSHGESSAELDEQDILAPQTVQCPAQAPAGGSEETIAKAKQSRSEKKARKAMSKLGLRQIQGVTRITIQKSKNILFVIAKPDVFKSPASDTYVVFGEAKIEDLSQQVHKAAAEKFKVPSEPSALVPESAPRPRVRLECKEEEEEEEEEVDEAGLELRDIELVMAQANVSRAKAVRALRDNHSDIVNAIMELTM

SEQ ID NO: 1070 - protein, 370 aa, Homo Sapiens
MNVTPEVKSRGMKFAEEQLLKHGWTQGKGLGRKENGITQALRVTLKQDTHGVGHDPAKEFTNHWWNELFNKTAANLVVETGQDGVQIRSLSKETTRYNHPKPNLLYQKFVKMATLTSGGEKPNKDLESCSDDDNQGSKSPKILTDEMLLQACEGRTAHKAARLGITMKAKLARLEAQEQAFLARLKGQDPGAPQLQSESKPPKKKKKKRRQKEEEEATASERNDADEKHPEHAEQNIRKSKKKKRRHQEGKVSDEREGTTKGNEKEDAAGTSGLGELNSREQTNQSLRKGKKKKRWHHEEEKMGVLEEGGKGKEAAGSVRTEEVESRAYADPCSRRKKRQQQEEEDLNLEDRGEETFRWWNQGSREQSMQ

SEQ ID NO: 1071 - protein, 396 aa, Homo Sapiens
MWIPVVGLPRRLRLSALAGAGRFCILGSEAATRKHLPARNHCGLSDSSPQLWPEPDFRNPPRKASKASLDFKRYVTDRRLAETLAQIYLGKPSRPPHLLLECNPGPGILTQALLEAGAKVVALESDKTFIPHLESLGKNLDGKLRVIHCDFFKLDPRSGGVIKPPAMSSRGLFKNLGIEAVPWTADIPLKVVGMFPSRGEKRALWKLAYDLYSCTSIYKFGRIEVNMFIGEKEFQKLMADPGNPDLYHVLSVIWQLACEIKVLHMEPWSSFDIYTRKGPLENPKRRELLDQLQQKLYLIQMIPRQNLFTKNLTPMNYNIFFHLLKHCFGRRSATVIDHLRSLTPLDARDILMQIGKQEDEKVVNMHPQDFKTLFETIERSKDCAYKWLYDETLEDR

SEQ ID NO: 1072 - protein, 780 aa, Homo Sapiens
MAAVDLEKLRASGAGKAIGVLTSGGDAQGMNAAVRAVTRMGIYVGAKVFLIYEGYEGLVEGGENIKQANWLSVSNIIQLGGTIIGSARCKAFTTREGRRAAAYNLVQHGITNLCVIGGDGSLTGANIFRSEWGSLLEELVAEGKISETTARTYSHLNIAGLVGSIDNDFCGTDMTIGTDSALHRIMEVIDAITTTAQSHQRTFVLEVMGRHCGYLALVSALASGADWLFIPEAPPEDGWENFMCERLGETRSRGSRLNIIIIAEGAIDRNGKPISSSYVKDLVVQRLGFDTRVTVLGHVQRGGTPSAFDRILSSKMGMEAVMALLEATPDTPACVVTLSGNQSVRLPLMECVQMTKEVQKAMDDKRFDEATQLRGGSFENNWNIYKLLAHQKPPKEKSNFSLAILNVGAPAAGMNAAVRSAVRTGISHGHTVYVVHDGFEGLAKGQVQEVGWHDVAGWLGRGGSMLGTKRTLPKGQLESIVENIRIYGIHALLVVGGFEAYEGVLQLVEARGRYEELCIVMCVIPATISNNVPGTDFSLGSDTAVNAAMESCDRIKQSASGTKRRVFIVETMGGYCGYLATVTGIAVGADAAYVFEDPFNIHDLKVNVEHMTEKMKTDIQRGLVLRNEKCHDYYTTEFLYNLYSSEGKGVFDCRTNVLGHLQQGGAPTPFDRNYGTKLGVKAMLWLSEKLREVYRKGRVFANAPDSACVIGLKKKAVAFSPVTELKKDTDFEHRMPREQWWLSLRLMLKMLAQYRISMAAYVSGELEHVTRRTLSMDKGF

SEQ ID NO: 1073 - protein, 270 aa, Homo Sapiens
MVLLKEYRVILPVSVDEYQVGQLYSVAEASKNETGGGEGVEVLVNEPYEKDGEKGQYTHKIYHLQSKVPTFVRMLAPEGALNIHEKAWNAYPYCRTVITNEYMKEDFLIKIETWHKPDLGTQENVHKLEPEAWKHVEAVYIDIADRSQVLSKDYKAEEDPAKFKSIKTGRGPLGPNWKQELVNQKDCPYMCAYKLVTVKFKWWGLQNKVENFIHKQERRLFTNFHRQLFCWLDKWVDLTMDDIRRMEEETKRQLDEMRQKDPVKGMTADD

SEQ ID NO: 1074 - protein, 423 aa, Homo Sapiens
MAMVVSSWRDPQDDVAGGNPGGPNPAAQAARGGGGGAGEQQQQAGSGAPHTPQTPGQPGAPATPGTAGDKGQGPPGSGQSQQHIECVVCGDKSSGKHYGQFTCEGCKSFFKRSVRRNLTYTCRANRNCPIDQHHRNQCQYCRLKKCLKVGMRREAVQRGRMPPTQPNPGQYALTNGDPLNGHCYLSGYISLLLRAEPYPTSRYGSQCMQPNNIMGIENICELAARLLFSAVEWARNIPFFPDLQITDQVSLLRLTWSELFVLNAAQCSMPLHVAPLLAAAGLHASPMSADRVVAFMDHIRIFQEQVEKLKALHVDSAEYSCLKAIVLFTSDACGLSDAAHIESLQEKSQCALEEYVRSQYPNQPSRFGKLLLRLPSLRTVSSSVIEQLFFVRLVGKTPIETLIRDMLLSGSSFNWPYMSIQCS

SEQ ID NO: 1075 - protein, 216 aa, Homo Sapiens
MGTRDDEYDYLFKVVLIGDSGVGKSNLLSRFTRNEFNLESKSTIGVEFATRSIQVDGKTIKAQIWDTAGQERYRAITSAYYRGAVGALLVYDIAKHLTYENVERWLKELRDHADSNIVIMLVGNKSDLRHLRAVPTDEARAFAEKNGLSFIETSALDSTNVEAAFQTILTEIYRIVSQKQMSDRRENDMSPSNNVVPIHVPPTTENKPKVQCCQNI

SEQ ID NO: 1076 - protein, 689 aa, Homo Sapiens
MEDTGIQRGIWDGDAKAVQQCLTDIFTSVYTTCDIPENAIFGPCVLSHTSLYDSIAFIALKSTDKRTVPYIFRVDTSAANGSSEGLMWLRLVQSARDKEEQNLEAYIKNGQLFYRSLRRIAKDEELLVWYGKELTELLLLCPSRSHNKMNGSSPYTCLECSQRFQFEFPYVAHLRFRCPKRLHSADISPQDEQGGGVGTKDHGGGGGGGKDQQQQQQEAPLGPGPKFCKAGPLHHYPSPSPESSNPSAAAGGSSAKPSTDFHNLARELENSRGGSSCSPAQSLSSGSGSGGGGGHQEAELSPDGIATGGGKGKRKFPEEAAEGGGGAGLVGGRGRFVERPLPASKEDLVCTPQQYRASGSYFGLEENGRLFAPPSPETGEAKRSAFVEVKKAARAASLQEEGTADGAGVASEDQDAGGGGGSSTPAAASPVGAEKLLAPRPGGPLPSRLEGGSPARGSAFTSVPQLGSAGSTSGGGGTGAGAAGGAGGGQGAASDERKSAFSQPARSFSQLSPLVLGQKLGALEPCHPADGVGPTRLYPAAADPLAVKLQGAADLNGGCGSLPSGGGGLPKQSPFLYATAFWPKSSAAAAAAAAAAAAGPLQLQLPSALTLLPPSFTSLCLPAQNWCAKCNASFRMTSDLVYHMRSHHKKEYAMEPLVKRRREEKLKCPICNESFRERHHLSRHMTSHN

SEQ ID NO: 1077 - protein, 436 aa, Homo Sapiens
MDQPFTVNSLKKLAAMPDHTDVSLSPEERVRALSKLGCNITISEDITPRRYFRSGVEMERMASVYLEEGNLENAFVLYNKFITLFVEKLPNHRDYQQCAVPEKQDIMKKLKEIAFPRTDELKNDLLKKYNVEYQEYLQSKNKYKAEILKKLEHQRLIEAERKRIAQMRQQQLESEQFLFFEDQLKKQELARGQMRSQQTSGLSEQIDGSALSCFSTHQNNSLLNVFADQPNKSDATNYASHSPPVNRALTPAATLSAVQNLVVEGLRCVVLPEDLCHKFLQLAESNTVRGIETCGILCGKLTHNEFTITHVIVPKQSAGPDYCDMENVEELFNVQDQHDLLTLGWIHTHPTQTAFLSSVDLHTHCSYQLMLPEAIAIVCSPKHKDTGIFRLTNAGMLEVSACKKKGFHPHTKEPRLFSICKHVLVKDIKIIVLDLR

SEQ ID NO: 1078 - protein, 106 aa, Homo Sapiens
MAQEFVNCKIQPGKVVVFIKPTCPYCRRAQEILSQLPIKQGLLEFVDITATNHTNEIQDYLQQLTGARTVPRVFIGKDCIGGCSDLVSLQQSGELLTRLKQIGALQ

SEQ ID NO: 1079 - protein, 205 aa, Homo Sapiens
MTERRVPFSLLRGPSWDPFRDWYPHSRLFDQAFGLPRLPEEWSQWLGGSSWPGYVRPLPPAAIESPAVAAPAYSRALSRQLSSGVSEIRHTADRWRVSLDVNHFAPDELTVKTKDGVVEITGKHEERQDEHGYISRCFTRKYTLPPGVDPTQVSSSLSPEGTLTVEAPMPKLATQSNEITIPVTFESRAQLGGPEAAKSDETAAK

SEQ ID NO: 1080 - protein, 464 aa, Homo Sapiens
MLATRRLLGWSLPARVSVRFSGDTTAPKKTSFGSLKDEDRIFTNLYGRHDWRLKGSLSRGDWYKTKEILLKGPDWILGEIKTSGLRGRGGAGFPTGLKWSFMNKPSDGRPKYLVVNADEGEPGTCKDREILRHDPHKLLEGCLVGGRAMGARAAYIYIRGEFYNEASNLQVAIREAYEAGLIGKNACGSGYDFDVFVVRGAGAYICGEETALIESIEGKQGKPRLKPPFPADVGVFGCPTTVANVETVAVSPTICRRGGTWFAGFGRERNSGTKLFNISGHVNHPCTVEEEMSVPLKELIEKHAGGVTGGWDNLLAVIPGGSSTPLIPKSVCETVLMDFDALVQAQTGLGTAAVIVMDRSTDIVKAIARLIEFYKHESCGQCTPCREGVDWMNKVMARFVRGDARPAEIDSLWEISKQIEGHTICALGDGAAWPVQGLIRHFRPELEERMQRFAQQHQARQAAS

SEQ ID NO: 1081 - protein, 473 aa, Homo Sapiens
MAAPCLLRQGRAGALKTMLQEAQVFRGLASTVSLSAESGKSEKGQPQNSKKQSPPKNVVEPKERGKLLATQTAAELSKNLSSPSSYPPAVNKGRKVASPSPSGSVLFTDEGVPKFLSRKTLVEFPQKVLSPFRKQGSDSEARQVGRKVTSPSSSSSSSSSDSESDDEADVSEVTPRVVSKGRGGLRKPEASHSFENRAPRVTVSAKEKTLLQKPHVDITDPEKPHQPKKKGSPAKPSEGRENARPKTTMPRSQVDEEFLKQSLKEKQLQKTFRLNEIDKESQKPFEVKGPLPVHTKSGLSAPPKGSPAPAVLAEEARAEGQLQASPPGAAEGHLEKPVPEPQRKAAPPLPRKETSGTQGIEGHLKGGQAIVEDQIPPSNLETVPVENNHGFHEKTAALKLEAEGEAMEDAAAPGDDRGGTQEPAPVPAEPFDNTTYKNLQHHDYSTYTFLDLNLELSKFRMPQPSSGRESPRH

SEQ ID NO: 1082 - protein, 195 aa, Homo Sapiens
MAPAASRLRAEAGLGALPRRALAQYLLFLRLYPVLTKAATSGILSALGNFLAQMIEKKRKKENSRSLDVGGPLRYAVYGFFFTGPLSHFFYFFMEHWIPPEVPLAGLRRLLLDRLVFAPAFLMLFFLIMNFLEGKDASAFAAKMRGGFWPALRMNWRVWTPLQFININYVPLKFRVLFANLAALFWYAYLASLGK

SEQ ID NO: 1083 - protein, 1112 aa, Homo Sapiens
MALKMVKGSIDRMFDKNLQDLVRGIRNHKEDEAKYISQCIDEIKQELKQDNIAVKANAVCKLTYLQMLGYDISWAAFNIIEVMSASKFTFKRIGYLAASQSFHEGTDVIMLTTNQIRKDLSSPSQYDTGVALTGLSCFVTPDLARDLANDIMTLMSHTKPYIRKKAKLIEPLTNLIHSTSAMSLLYECVNTVIAVLISLSSGMPNHSASIQLCVQKLRILIEDSDQNLKYLGLLAMSKILKTHPKSVQSHKDLILQCLDDKDESIRLRALDLLYGMVSKKNLMEIVKKLMTHVDKAEGTTYRDELLTKIIDICSQSNYQYITNFEWYISILVELTRLEGTRHGHLIAAQMLDVAIRVKAIRKFAVSQMSALLDSAHLLASSTQRNGICEVLYAAAWICGEFSEHLQEPHHTLEAMLRPRVTTLPGHIQAVYVQNVVKLYASILQQKEQAGEAEGAQAVTQLMVDRLPQFVQSADLEVQERASCILQLVKHIQKLQAKDVPVAEEVSALFAGELNPVAPKAQKKVPVPEGLDLDAWINEPLSDSESEDERPRAVFHEEEQRRPKHRPSEADEEELARRREARKQEQANNPFYIKSSPSPQKRYQDTPGVEHIPVVQIDLSVPLKVPGLPMSDQYVKLEEERRHRQKLEKDKRRKKRKEKEKKGKRRHSSLPTESDEDIAPAQQVDIVTEEMPENALPSDEDDKDPNDPYRALDIDLDKPLADSEKLPIQKHRNTETSKSPEKDVPMVEKKSKKPKKKEKKHKEKERDKEKKKEKEKKAEDLDFWLSTTPPPAPAPAPAPVPSTDECEDAKTEAQGEEDDAEGQDQDKKSPKPKKKKHRKEKEERTKGKKKSKKQPPGSEEAAGEPVQNGAPEEEQLPPESSYSLLAENSYVKMTCDIRGSLQEDSQVTVAIVLENRSSSILKGMELSVLDSLNARMARPQGSSVHDGVPVPFQLPPGVSNEAQYVFTIQSIVMAQKLKGTLSFIAKNDEGATHEKLDFRLHFSCSSYLITTPCYSDAFAKLLESGDLSMSSIKVDGIRMSFQNLLAKICFHHHFSVVERVDSCASMYSRSIQGHHVCLLVKKGENSVSVDGKCSDSTLLSNLLEEMKATLAKC

SEQ ID NO: 1084 - protein, 963 aa, Homo Sapiens
MATAAETSASEPEAESKAGPKADGEEDEVKAARTRRKVLSRAVAAATYKTMGPAWDQQEEGVSESDGDEYAMASSAESSPGEYEWEYDEEEEKNQLEIERLEEQLSINVYDYNCHVDLIRLLRLEGELTKVRMARQKMSEIFPLTEELWLEWLHDEISMAQDGLDREHVYDLFEKAVKDYICPNIWLEYGQYSVGGIGQKGGLEKVRSVFERALSSVGLHMTKGLALWEAYREFESAIVEAARLEKVHSLFRRQLAIPLYDMEATFAEYEEWSEDPIPESVIQNYNKALQQLEKYKPYEEALLQAEAPRLAEYQAYIDFEMKIGDPARIQLIFERALVENCLVPDLWIRYSQYLDRQLKVKDLVLSVHNRAIRNCPWTVALWSRYLLAMERHGVDHQVISVTFEKALNAGFIQATDYVEIWQAYLDYLRRRVDFKQDSSKELEELRAAFTRALEYLKQEVEERFNESGDPSCVIMQNWARIEARLCNNMQKARELWDSIMTRGNAKYANMWLEYYNLERAHGDTQHCRKALHRAVQCTSDYPEHVCEVLLTMERTEGSLEDWDIAVQKTETRLARVNEQRMKAAEKEAALVQQEEEKAEQRKRARAEKKALKKKKKIRGPEKRGADEDDEKEWGDDEEEQPSKRRRVENSIPAAGETQNVEVAAGPAGKCAAVDVEPPSKQKEKAASLKRDMPKVLHDSSKDSITVFVSNLPYSMQEPDTKLRPLFEACGEVVQIRPIFSNRGDFRGYCYVEFKEEKSALQALEMDRKSVEGRPMFVSPCVDKSKNPDFKVFRYSTSLEKHKLFISGLPFSCTKEELEEICKAHGTVKDLRLVTNRAGKPKGLAYVEYENESQASQAVMKMDGMTIKENIIKVAISNPPQRKVPEKPETRKAPGGPMLLPQTYGARGKGRTQLSLLPRALQRPSAAAPQAENGPAAAPAVAAPAATEAPKMSNADFAKLFLRK

SEQ ID NO: 1085 - protein, 283 aa, Homo Sapiens
MDLWPGAWMLLLLLFLLLLFLLPTLWFCSPSAKYFFKMAFYNGWILFLAVLAIPVCAVRGRNVENMKILRLMLLHIKYLYGIRVEVRGAHHFPPSQPYVVVSNHQSSLDLLGMMEVLPGRCVPIAKRELLWAGSAGLACWLAGVIFIDRKRTGDAISVMSEVAQTLLTQDVRVWVFPEGTRNHNGSMLPFKRGAFHLAVQAQVPIVPIVMSSYQDFYCKKERRFTSGQCQVRVLPPVPTEGLTPDDVPALADRVRHSMLTVFREISTDGRGGGDYLKKPGGGG

SEQ ID NO: 1086 - protein, 209 aa, Homo Sapiens
MELNSLLILLEAAEYLERRDREAEHGYASVLPFDGDFAREKTKAAGLVRKAPNNRSSHNELEKHRRAKLRLYLEQLKQLVPLGPDSTRHTTLSLLKRAKVHIKKLEEQDRRALSIKEQLQQEHRFLKRRLEQLSVQSVERVRTDSTGSAVSTDDSEQEVDIEGMEFGPGELDSVGSSSDADDHYSLQSGTGGDSGFGPHCRRLGRPALS

SEQ ID NO: 1087 - protein, 1016 aa, Homo Sapiens
MSQGPPTGESSEPEAKVLHTKRLYRAVVEAVHRLDLILCNKTAYQEVFKPENISLRNKLRELCVKLMFLHPVDYGRKAEELLWRKVYYEVIQLIKTNKKHIHSRSTLECAYRTHLVAGIGFYQHLLLYIQSHYQLELQCCIDWTHVTDPLIGCKKPVSASGKEMDWAQMACHRCLVYLGDLSRYQNELAGVDTELLAERFYYQALSVAPQIGMPFNQLGTLAGSKYYNVEAMYCYLRCIQSEVSFEGAYGNLKRLYDKAAKMYHQLKKCETRKLSPGKKRCKDIKRLLVNFMYLQSLLQPKSSSVDSELTSLCQSVLEDFNLCLFYLPSSPNLSLASEDEEEYESGYAFLPDLLIFQMVIICLMCVHSLERAGSKQYSAAIAFTLALFSHLVNHVNIRLQAELEEGENPVPAFQSDGTDEPESKEPVEKEEEPDPEPPPVTPQVGEGRKSRKFSRLSCLRRRRHPPKVGDDSDLSEGFESDSSHDSARASEGSDSGSDKSLEGGGTAFDAETDSEMNSQESRSDLEDMEEEEGTRSPTLEPPRGRSEAPDSLNGPLGPSEASIASNLQAMSTQMFQTKRCFRLAPTFSNLLLQPTTNPHTSASHRPCVNGDVDKPSEPASEEGSESEGSESSGRSCRNERSIQEKLQVLMAEGLLPAVKVFLDWLRTNPDLIIVCAQSSQSLWNRLSVLLNLLPAAGELQESGLALCPEVQDLLEGCELPDLPSSLLLPEDMALRNLPPLRAAHRRFNFDTDRPLLSTLEESVVRICCIRSFGHFIARLQGSILQFNPEVGIFVSIAQSEQESLLQQAQAQFRMAQEEARRNRLMRDMAQLRLQLEVSQLEGSLQQPKAQSAMSPYLVPDTQALCHHLPVIRQLATSGRFIVIIPRTVIDGLDLLKKEHPGARDGIRYLEAEFKKGNRYIRCQKEVGKSFERHKLKRQDADAWTLYKILDSCKQLTLAQGAGEEDPSGMVTIITGLPLDNPSVLSGPMQAALQAAAHASVDIKNVLDFYKQWKEIG

SEQ ID NO: 1088 - protein, 2039 aa, Homo Sapiens
MDIVDTFNHLIPTEHLDDALFLGSNLENEVCEDFSASQNVLEDSLKNMLSDKDPMLGSASNQFCLPVLDSNDPNFQMPCSTVVGLDDIMDEGVVKESGNDTIDEEELILPNRNLRDKVEENSVRSPRKSPRLMAQEQVRSLRQSTIAKRSNAAPLSNTKKASGKTVSTAKAGVKQPERSQVKEEVCMSLKPEYHKENRRCSRNSGQIEVVPEVSVSSSHSSVSSCLEMKDEDGLDSKHKCNNPGEIDVPSHELNCSLLSETCVTIGEKKNEALMECKAKPVGSPLFKFSDKEEHEQNDSISGKTGETVVEEMIATRKVEQDSKETVKLSHEDDHILEDAGSSDISSDAACTNPNKTENSLVGLPSCVDEVTECNLELKDTMGIADKTENTLERNKIEPLGYCEDAESNRQLESTEFNKSNLEVVDTSTFGPESNILENAICDVPDQNSKQLNAIESTKIESHETANLQDDRNSQSSSVSYLESKSVKSKHTKPVIHSKQNMTTDAPKKIVAAKYEVIHSKTKVNVKSVKRNTDVPESQQNFHRPVKVRKKQIDKEPKIQSCNSGVKSVKNQAHSVLKKTLQDQTLVQIFKPLTHSLSDKSHAHPGCLKEPHHPAQTGHVSHSSQKQCHKPQQQAPAMKTNSHVKEELEHPGVEHFKEEDKLKLKKPEKNLQPRQRRSSKSFSLDEPPLFIPDNIATIRREGSDHSSSFESKYMWTPSKQCGFCKKPHGNRFMVGCGRCDDWFHGDCVGLSLSQAQQMGEEDKEYVCVKCCAEEDKKTEILDPDTLENQATVEFHSGDKTMECEKLGLSKHTTNDRTKYIDDTVKHKVKILKRESGEGRNSSDCRDNEIKKWQLAPLRKMGQPVLPRRSSEEKSEKIPKESTTVTCTGEKASKPGTHEKQEMKKKKVEKGVLNVHPAASASKPSADQIRQSVRHSLKDILMKRLTDSNLKVPEEKAAKVATKIEKELFSFFRDTDAKYKNKYRSLMFNLKDPKNNILFKKVLKGEVTPDHLIRMSPEELASKELAAWRRRENRHTIEMIEKEQREVERRPITKITHKGEIEIESDAPMKEQEAAMEIQEPAANKSLEKPEGSEKQKEEVDSMSKDTTSQHRQHLFDLNCKICIGRMAPPVDDLSPKKVKVVVGVARKHSDNEAESIADALSSTSNILASEFFEEEKQESPKSTFSPAPRPEMPGTVEVESTFLARLNFIWKGFINMPSVAKFVTKAYPVSGSPEYLTEDLPDSIQVGGRISPQTVWDYVEKIKASGTKEICVVRFTPVTEEDQISYTLLFAYFSSRKRYGVAANNMKQVKDMYLIPLGATDKIPHPLVPFDGPGLELHRPNLLLGLIIRQKLKRQHSACASTSHIAETPESAPPIALPPDKKSKIEVSTEEAPEEENDFFNSFTTVLHKQRNKPQQNLQEDLPTAVEPLMEVTKQEPPKPLRFLPGVLIGWENQPTTLELANKPLPVDDILQSLLGTTGQVYDQAQSVMEQNTVKEIPFLNEQTNSKIEKTDNVEVTDGENKEIKVKVDNISESTDKSAEIETSVVGSSSISAGSLTSLSLRGKPPDVSTEAFLTNLSIQSKQEETVESKEKTLKRQLQEDQENNLQDNQTSNSSPCRSNVGKGNIDGNVSCSENLVANTARSPQFINLKRDPRQAAGRSQPVTTSESKDGDSCRNGEKHMLPGLSHNKEHLTEQINVEEKLCSAEKNSCVQQSDNLKVAQNSPSVENIQTSQAEQAKPLQEDILMQNIETVHPFRRGSAVATSHFEVGNTCPSEFPSKSITFTSRSTSPRTSTNFSPMRPQQPNLQHLKSSPPGFPFPGPPNFPPQSMFGFPPHLPPPLLPPPGFGFAQNPMVPWPPVVHLPGQPQRMMGPLSQASRYIGPQNFYQVKDIRRPERRHSDPWGRQDQQQLDRPFNRGKGDRQRFYSDSHHLKRERHEKEWEQESERHRRRDRSQDKDRDRKSREEGHKDKERARLSHGDRGTDGKASRDSRNVDKKPDKPKSEDYEKDKEREKSKHREGEKDRDRYHKDRDHTDRTKSKR

SEQ ID NO: 1089 - protein, 557 aa, Homo Sapiens
MDSDEGYNYEFDEDEECSEEDSGAEEEEDEDDDEPDDDTLDLGEVELVEPGLGVGGERDGLLCGETGGGGGSALGPGGGGGGGGGGGGGGPGHEQEEDYRYEVLTAEQILQHMVECIREVNEVIQNPATITRILLSHFNWDKEKLMERYFDGNLEKLFAECHVINPSKKSRTRQMNTRSSAQDMPCQICYLNYPNSYFTGLECGHKFCMQCWSEYLTTKIMEEGMGQTISCPAHGCDILVDDNTVMRLITDSKVKLKYQHLITNSFVECNRLLKWCPAPDCHHVVKVQYPDAKPVRCKCGRQFCFNCGENWHDPVKCKWLKKWIKKCDDDSETSNWIAANTKECPKCHVTIEKDGGCNHMVCRNQNCKAEFCWVCLGPWEPHGSAWYNCNRYNEDDAKAARDAQERSRAALQRYLFYCNRYMNHMQSLRFEHKLYAQVKQKMEEMQQHNMSWIEVQFLKKAVDVLCQCRATLMYTYVFAFYLKKNNQSIIFENNQADLENATEVLSGYLERDISQDSLQDIKQKVQDKYRYCESRRRVLLQHVHEGYEKDLWEYIED

SEQ ID NO: 1090 - protein, 837 aa, Homo Sapiens
MTTFGAVAEWRLPSLRRATLWIPQWFAKKAIFNSPLEAAMAFPHLQQPSFLLASLKADSINKPFAQQCQDLVKVIEDFPAKELHTIFPWLVESIFGSLDGVLVGWNLRCLQGRVNPVEYSIVMEFLDPGGPMMKLVYKLQAEDYKFDFPVSYLPGPVKASIQECILPDSPLYHNKVQFTPTGGLGLNLALNPFEYYIFFFALSLITQKPLPVSLHVRTSDCAYFILVDRYLSWFLPTEGSVPPPLSSSPGGTSPSPPPRTPAIPFASYGLHHTSLLKRHISHQTSVNADPASHEIWRSETLLQVFVEMWLHHYSLEMYQKMQSPHAKESFTPTEEHVLVVRLLLKHLHAFANSLKPEQASPSAHSHATSPLEEFKRAAVPRFVQQKLYLFLQHCFGHWPLDASFRAVLEMWLSYLQPWRYAPDKQAPGSDSQPRCVSEKWAPFVQENLLMYTKLFVGFLNRALRTDLVSPKHALMVFRVAKVFAQPNLAEMIQKGEQLFLEPELVIPHRQHRLFTAPTFTGSFLSPWPPAVTDASFKVKSHVYSLEGQDCKYTPMFGPEARTLVLRLAQLITQAKHTAKSISDQCAESPAGHSFLSWLGFSSMDTNGSYTANDLDEMGQDSVRKTDEYLEKALEYLRQIFRLSEAQLRQFTLALGTTQDENGKKQLPDCIVGEDGLILTPLGRYQIINGLRRFEIEYQGDPELQPIRSYEIASLVRTLFRLSSAINHRFAGQMAALCSRDDFLGSFCRYHLTEPGLASRHLLSPVGRRQVAGHTRGPRLSLRFLGSYRTLVSLLLAFFVASLFCVGPLPCTLLLTLGYVLYASAMTLLTERGKLHQP

SEQ ID NO: 1091 - protein, 257 aa, Homo Sapiens
MPARCVAAHCGNTTKSGKSLFRFPKDRAVRLLWDRFVRGCRADWYGGNDRSVICSDHFAPACFDVSSVIQKNLRFSQRLRLVAGAVPTLHRVPAPAPKRGEEGDQAGRLDTRGELQAARHSEAAPGPVSCTRPRAGKQAAASQITCENELVQTQPHADNPSNTVTSVPTHCEEGPVHKSTQISLKRPRHRSVGIQAKVKAFGKRLCNATTQTEELWSRTSSLFDIYSSDSETDTDWDIKSEQSDLSYMAVQVKEETC

SEQ ID NO: 1092 - protein, 359 aa, Homo Sapiens
MAATLGPLGSWQQWRRCLSARDGSRMLLLLLLLGSGQGPQQVGAGQTFEYLKREHSLSKPYQGVGTGSSSLWNLMGNAMVMTQYIRLTPDMQSKQGALWNRVPCFLRDWELQVHFKIHGQGKKNLHGDGLAIWYTKDRMQPGPVFGNMDKFVGLGVFVDTYPNEEKQQEAQKRRYSPGVQRVFPYISAMVNNGSLSYDHERDGRPTELGGCTAIVRNLHYDTFLVIRYVKRHLTIMMDIDGKHEWRDCIEVPGVRLPRGYYFGTSSITGDLSDNHDVISLKLFELTVERTPEEEKLHRDVFLPSVDNMKLPEMTAPLPPLSGLALFLIVFFSLVFSVFAIVIGIILYNKWQEQSRKRFY

SEQ ID NO: 1093 - protein, 528 aa, Homo Sapiens
MAEHLELLAEMPMVGRMSTQERLKHAQKRRAQQVKMWAQAEKEAQGKKGPGERPRKEAASQGLLKQVLFPPSVVLLEAAARNDLEEVRQFLGSGVSPDLANEDGLTALHQCCIDDFREMVQQLLEAGANINACDSECWTPLHAAATCGHLHLVELLIASGANLLAVNTDGNMPYDLCDDEQTLDCLETAMADRGITQDSIEAARAVPELRMLDDIRSRLQAGADLHAPLDHGATLLHVAAANGFSEAAALLLEHRASLSAKDQDGWEPLHAAAYWGQVPLVELLVAHGADLNAKSLMDETPLDVCGDEEVRAKLLELKHKHDALLRAQSRQRSLLRRRTSSAGSRGKVVRRVSLTQRTDLYRKQHAQEAIVWQQPPPTSPEPPEDNDDRQTGAELRPPPPEEDNPEVVRPHNGRVGGSPVRHLYSKRLDRSVSYQLSPLDSTTPHTLVHDKAHHTLADLKRQRAAAKLQRPPPEGPESPETAEPGLPGDTVTPQPDCGFRAGGDPPLLKLTAPAVEAPVERRPCCLLM

SEQ ID NO: 1094 - protein, 537 aa, Homo Sapiens
MEGLLSVALQGAELEGNWKHEGQVEDLQENQESCPEPEAVACKGDPAGDSMQERDEFSRIPRTISSPAATQASVPDDSSSRRCSAPGESPKERHPDSRQRERGGGPKKPWKCGDCGKAFSYCSAFILHQRIHTGEKPFACPECGKAFSQSVHLTLHQRTHTGEKPYACHECGKAFSQGSYLASHWRTHTGEKPHRCADCGKAFTRVTHLTQHRRVHTGERPYACAQCAKAFRNRSSLIEHQRIHTGEKPYECSACAKAFRFSSALIRHQRIHTEEKPYRCGQCAKAFAQIAHLTQHRRVHTGEKPYTCQDCGALFSQSASLAEHRRIHTGEKPYACGQCAKAFTQVSHLTQHQRTHTGERPYPCHDCGKRFSNRSHLLQHRLVHTGERPYRCLQCGAAFSHVSSLIEHQKIHTGERPYKCGECGKAFSQGSSLALHQRTHTGERPYTCPECGKAFSNRSYLIQHHIVHTGEKPYECSGCGKAFSFSSALIRHQRTHADSSGRLCPAPTPDSTPGLSQGGETCQQGCPGRNPRGPAED

SEQ ID NO: 1095 - protein, 2843 aa, Homo Sapiens
MAAASYDQLLKQVEALKMENSNLRQELEDNSNHLTKLETEASNMKEVLKQLQGSIEDEAMASSGQIDLLERLKELNLDSSNFPGVKLRSKMSLRSYGSREGSVSSRSGECSPVPMGSFPRRGFVNGSRESTGYLEELEKERSLLLADLDKEEKEKDWYYAQLQNLTKRIDSLPLTENFSLQTDMTRRQLEYEARQIRVAMEEQLGTCQDMEKRAQRRIARIQQIEKDILRIRQLLQSQATEAERSSQNKHETGSHDAERQNEGQGVGEINMATSGNGQGSTTRMDHETASVLSSSSTHSAPRRLTSHLGTKVEMVYSLLSMLGTHDKDDMSRTLLAMSSSQDSCISMRQSGCLPLLIQLLHGNDKDSVLLGNSRGSKEARARASAALHNIIHSQPDDKRGRREIRVLHLLEQIRAYCETCWEWQEAHEPGMDQDKNPMPAPVEHQICPAVCVLMKLSFDEEHRHAMNELGGLQAIAELLQVDCEMYGLTNDHYSITLRRYAGMALTNLTFGDVANKATLCSMKGCMRALVAQLKSESEDLQQVIASVLRNLSWRADVNSKKTLREVGSVKALMECALEVKKESTLKSVLSALWNLSAHCTENKADICAVDGALAFLVGTLTYRSQTNTLAIIESGGGILRNVSSLIATNEDHRQILRENNCLQTLLQHLKSHSLTIVSNACGTLWNLSARNPKDQEALWDMGAVSMLKNLIHSKHKMIAMGSAAALRNLMANRPAKYKDANIMSPGSSLPSLHVRKQKALEAELDAQHLSETFDNIDNLSPKASHRSKQRHKQSLYGDYVFDTNRHDDNRSDNFNTGNMTVLSPYLNTTVLPSSSSSRGSLDSSRSEKDRSLERERGIGLGNYHPATENPGTSSKRGLQISTTAAQIAKVMEEVSAIHTSQEDRSSGSTTELHCVTDERNALRRSSAAHTHSNTYNFTKSENSNRTCSMPYAKLEYKRSSNDSLNSVSSSDGYGKRGQMKPSIESYSEDDESKFCSYGQYPADLAHKIHSANHMDDNDGELDTPINYSLKYSDEQLNSGRQSPSQNERWARPKHIIEDEIKQSEQRQSRNQSTTYPVYTESTDDKHLKFQPHFGQQECVSPYRSRGANGSETNRVGSNHGINQNVSQSLCQEDDYEDDKPTNYSERYSEEEQHEEEERPTNYSIKYNEEKRHVDQPIDYSLKYATDIPSSQKQSFSFSKSSSGQSSKTEHMSSSSENTSTPSSNAKRQNQLHPSSAQSRSGQPQKAATCKVSSINQETIQTYCVEDTPICFSRCSSLSSLSSAEDEIGCNQTTQEADSANTLQIAEIKEKIGTRSAEDPVSEVPAVSQHPRTKSSRLQGSSLSSESARHKAVEFSSGAKSPSKSGAQTPKSPPEHYVQETPLMFSRCTSVSSLDSFESRSIASSVQSEPCSGMVSGIISPSDLPDSPGQTMPPSRSKTPPPPPQTAQTKREVPKNKAPTAEKRESGPKQAAVNAAVQRVQVLPDADTLLHFATESTPDGFSCSSSLSALSLDEPFIQKDVELRIMPPVQENDNGNETESEQPKESNENQEKEAEKTIDSEKDLLDDSDDDDIEILEECIISAMPTKSSRKAKKPAQTASKLPPPVARKPSQLPVYKLLPSQNRLQPQKHVSFTPGDDMPRVYCVEGTPINFSTATSLSDLTIESPPNELAAGEGVRGGAQSGEFEKRDTIPTEGRSTDEAQGGKTSSVTIPELDDNKAEEGDILAECINSAMPKGKSHKPFRVKKIMDQVQQASASSSAPNKNQLDGKKKKPTSPVKPIPQNTEYRTRVRKNADSKNNLNAERVFSDNKDSKKQNLKNNSKVFNDKLPNNEDRVRGSFAFDSPHHYTPIEGTPYCFSRNDSLSSLDFDDDDVDLSREKAELRKAKENKESEAKVTSHTELTSNQQSANKTQAIAKQPINRGQPKPILQKQSTFPQSSKDIPDRGAATDEKLQNFAIENTPVCFSHNSSLSSLSDIDQENNNKENEPIKETEPPDSQGEPSKPQASGYAPKSFHVEDTPVCFSRNSSLSSLSIDSEDDLLQECISSAMPKKKKPSRLKGDNEKHSPRNMGGILGEDLTLDLKDIQRPDSEHGLSPDSENFDWKAIQEGANSIVSSLHQAAAAACLSRQASSDSDSILSLKSGISLGSPFHLTPDQEEKPFTSNKGPRILKPGEKSTLETKKIESESKGIKGGKKVYKSLITGKVRSNSEISGQMKQPLQANMPSISRGRTMIHIPGVRNSSSSTSPVSKKGPPLKTPASKSPSEGQTATTSPRGAKPSVKSELSPVARQTSQIGGSSKAPSRSGSRDSTPSRPAQQPLSRPIQSPGRNSISPGRNGISPPNKLSQLPRTSSPSTASTKSSGSGKMSYTSPGRQMSQQNLTKQTGLSKNASSIPRSESASKGLNQMNNGNGANKKVELSRMSSTKSSGSESDRSERPVLVRQSTFIKEAPSPTLRRKLEESASFESLSPSSRPASPTRSQAQTPVLSPSLPDMSLSTHSSVQAGGWRKLPPNLSPTIEYNDGRPAKRHDIARSHSESPSRLPINRSGTWKREHSKHSSSLPRVSTWRRTGSSSSILSASSESSEKAKSEDEKHVNSISGTKQSKENQVSAKGTWRKIKENEFSPTNSTSQTVSSGATNGAESKTLIYQMAPAVSKTEDVWVRIEDCPINNPRSGRSPTGNTPPVIDSVSEKANPNIKDSKDNQAKQNVGNGSVPMRTVGLENRLNSFIQVDAPDQKGTEIKPGQNNPVPVSETNESSIVERTPFSSSSSSKHSSPSGTVAARVTPFNYNPSPRKSSADSTSARPSQIPTPVNNNTKKRDSKTDSTESSGTQSPKRHSGSYLVTSV

SEQ ID NO: 1096 - protein, 471 aa, Homo Sapiens
MADERKDEAKAPHWTSAPLTEASAHSHPPEIKDQGGAGEGLVRSANGFPYREDEEGAFGEHGSQGTYSNTKENGINGELTSADRETAEEVSARIVQVVTAEAVAVLKGEQEKEAQHKDQTAALPLAAEETANLPPSPPPSPASEQTVTVEEAAGGESALAPSVFKQAKDKVSDGVTKSPEKRSSLPRPSSILPPRRGVSGDRDENSFSLNSSISSSARRTTRSEPIRRAGKSGTSTPTTPGSTAITPGTPPSYSSRTPGTPGTPSYPRTPHTPGTPKSAILVPSEKKVAIIRTPPKSPATPKQLRLINQPLPDLKNVKSKIGSTDNIKYQPKGGQVQIVTKKIDLSHVTSKCGSLKNIRHRPGGGRVKIESVKLDFKEKAQAKVGSLDNAHHVPGGGNVKIDSQKLNFREHAKARVDHGAEIITQSPGRSSVASPRRLSNVSSSGSINLLESPQLATLAEDVTAALAKQGL

SEQ ID NO: 1097 - protein, 270 aa, Homo Sapiens
MACRPRSPPRHQSRCDGDASPPSPARWSLGRKRRADGRRWRPEDAEEAEHRGAERRPESFTTPEGPKPRSRCSDWASAVEEDEMRTRVNKEMARYKRKLLINDFGRERKSSSGSSDSKESMSTVPADFETDESVLMRRQKQINYGKNTIAYDRYIKEVPRHLRQPGIHPKTPNKFKKYSRRSWDQQIKLWKVALHFWDPPAEEGCDLQEIHPVDLESAESSSEPQTSSQDDFDVYSGTPTKVRHMDSQVEDEFDLEACLTEPLRDFSAMS

SEQ ID NO: 1098 - protein, 543 aa, Homo Sapiens
MEQVNELKEKGNKALSVGNIDDALQCYSEAIKLDPHNHVLYSNRSAAYAKKGDYQKAYEDGCKTVDLKPDWGKGYSRKAAALEFLNRFEEAKRTYEEGLKHEANNPQLKEGLQNMEARLAERKFMNPFNMPNLYQKLESDPRTRTLLSDPTYRELIEQLRNKPSDLGTKLQDPRIMTTLSVLLGVDLGSMDEEEEIATPPPPPPPKKETKPEPMEEDLPENKKQALKEKELGNDAYKKKDFDTALKHYDKAKELDPTNMTYITNQAAVYFEKGDYNKCRELCEKAIEVGRENREDYRQIAKAYARIGNSYFKEEKYKDAIHFYNKSLAEHRTPDVLKKCQQAEKILKEQERLAYINPDLALEEKNKGNECFQKGDYPQAMKHYTEAIKRNPKDAKLYSNRAACYTKLLEFQLALKDCEECIQLEPTFIKGYTRKAAALEAMKDYTKAMDVYQKALDLDSSCKEAADGYQRCMMAQYNRHDSPEDVKRRAMADPEVQQIMSDPAMRLILEQMQKDPQALSEHLKNPVIAQKIQKLMDVGLIAIR

SEQ ID NO: 1099 - protein, 973 aa, Homo Sapiens
MASILDEYENSLSRSAVLQPGCPSVGIPHSGYVNAQLEKEVPIFTKQRIDFTPSERITSLVVSSNQLCMSLGKDTLLRIDLGKANEPNHVELGRKDDAKVHKMFLDHTGSHLLIALSSTEVLYVNRNGQKVRPLARWKGQLVESVGWNKALGTESSTGPILVGTAQGHIFEAELSASEGGLFGPAPDLYFRPLYVLNEEGGPAPVCSLEAERGPDGRSFVIATTRQRLFQFIGRAAEGAEAQGFSGLFAAYTDHPPPFREFPSNLGYSELAFYTPKLRSAPRAFAWMMGDGVLYGALDCGRPDSLLSEERVWEYPEGVGPGASPPLAIVLTQFHFLLLLADRVEAVCTLTGQVVLRDHFLEKFGPLKHMVKDSSTGQLWAYTERAVFRYHVQREARDVWRTYLDMNRFDLAKEYCRERPDCLDTVLAREADFCFRQRRYLESARCYALTQSYFEEIALKFLEARQEEALAEFLQRKLASLKPAERTQATLLTTWLTELYLSRLGALQGDPEALTLYRETKECFRTFLSSPRHKEWLFASRASIHELLASHGDTEHMVYFAVIMQDYERVVAYHCQHEAYEEALAVLARHRDPQLFYKFSPILIRHIPRQLVDAWIEMGSRLDARQLIPALVNYSQGGEVQQVSQAIRYMEFCVNVLGETEQAIHNYLLSLYARGRPDSLLAYLEQAGASPHRVHYDLKYALRLCAEHGHHRACVHVYKVLELYEEAVDLALQVDVDLAKQCADLPEEDEELRKKLWLKIARHVVQEEEDVQTAMACLASCPLLKIEDVLPFFPDFVTIDHFKEAICSSLKAYNHHIQELQREMEEATASAQRIRRDLQELRGRYGTVEPQDKCATCDFPLLNRPFYLFLCGHMFHADCLLQAVRPGLPAYKQARLEELQRKLGAAPPPAKGSARAKEAEGGAATAGPSREQLKADLDELVAAECVYCGELMIRSIDRPFIDPQRYEEEQLSWL

SEQ ID NO: 1100 - protein, 492 aa, Homo Sapiens
MEPSSKKLTGRLMLAVGGAVLGSLQFGYNTGVINAPQKVIEEFYNQTWVHRYGESILPTTLTTLWSLSVAIFSVGGMIGSFSVGLFVNRFGRRNSMLMMNLLAFVSAVLMGFSKLGKSFEMLILGRFIIGVYCGLTTGFVPMYVGEVSPTALRGALGTLHQLGIVVGILIAQVFGLDSIMGNKDLWPLLLSIIFIPALLQCIVLPFCPESPRFLLINRNEENRAKSVLKKLRGTADVTHDLQEMKEESRQMMREKKVTILELFRSPAYRQPILIAVVLQLSQQLSGINAVFYYSTSIFEKAGVQQPVYATIGSGIVNTAFTVVSLFVVERAGRRTLHLIGLAGMAGCAILMTIALALLEQLPWMSYLSIVAIFGFVAFFEVGPGPIPWFIVAELFSQGPRPAAIAVAGFSNWTSNFIVGMCFQYVEQLCGPYVFIIFTVLLVLFFIFTYFKVPETKGRTFDEIASGFRQGGASQSDKTPEELFHPLGADSQV

SEQ ID NO: 1101 - protein, 168 aa, Homo Sapiens
MNSKGQYPTQPTYPVQPPGNPVYPQTLHLPQAPPYTDAPPAYSELYRPSFVHPGAATVPTMSAAFPGASLYLPMAQSVAVGPLGSTIPMAYYPVGPIYPPGSTVLVEGGYDAGARFGAGATAGNIPPPPPGCPPNAAQLAVMQGANVLVTQRKGNFFMGGSDGGYTIW

SEQ ID NO: 1102 - protein, 1006 aa, Homo Sapiens
MGSAEDAVKEKLLWNVKKEVKQIMEEAVTRKFVHEDSSHIIALCGAVEACLLHQLRRRAAGFLRSDKMAALFTKVGKTCPVAGEICHKVQELQQQAEGRKPSGVSQEALRRQGSASGKAPALSPQALKHVWVRTALIEKVLDKVVQYLAENCSKYYEKEALLADPVFGPILASLLVGPCALEYTKLKTADHYWTDPSADELVQRHRIRGPPTRQDSPAKRPALGIRKRHSSGSASEDRLAACARECVESLHQNSRTRLLYGKNHVLVQPKEDMEAVPGYLSLHQSAESLTLKWTPNQLMNGTLGDSELEKSVYWDYALVVPFSQVVCIHCHQQKSGGTLVLVSQDGIQRPPLHFPQGGHLLSFLSCLENGLLPRGQLEPPLWTQQGKGKVFPKLRKRSSIRSVDMEEMGTGRATDYVFRIIYPGHRHEHNAGDMIEMQGFGPSLPAWHLEPLCSQGSSCLSCSSSSSPHATPSHCSCIPDRLPLRLLCESMKRQIVSRAFYGWLAHCRHLSTVRTHLSALVHHSVIPPDRPPGASAGLTKDVWSKYQKDKKNYKELELLRQVYYGGIEHEIRKDVWPFLLGHYKFGMSKKEMEQVDAVVAARYQQVLAEWKACEVVVRQREREAHPATRTKFSSGSSIDSHVQRLIHRDSTISNDVFISVDDLEPPEPQDPEDSRPKPEQEAGPGTPGTAVVEQQHSVEFDSPDSGLPSSRNYSVASGIQSSLDEGQSVGFEEEDGGGEEGSSGPGPAAHTLREPQDPSQEKPQAGELEAGEELAAVCAAAYTIELLDTVALNLHRIDKDVQRCDRNYWYFTPPNLERLRDVMCSYVWEHLDVGYVQGMCDLLAPLLVTLDNDQLAYSCFSHLMKRMSQNFPNGGAMDTHFANMRSLIQILDSELFELMHQNGDYTHFYFCYRWFLLDFKRELLYEDVFAVWEVIWAARHISSEHFVLFIALALVEAYREIIRDNNMDFTDIIKFFNERAEHHDAQEILRIARDLVHKVQMLIENK

SEQ ID NO: 1103 - protein, 978 aa, Homo Sapiens
MGTRLPLVLRQLRRPPQPPGPPRRLRVPCRASSGGGGGGGGGREGLLGQRRPQDGQARSSCSPGGRTPAARDSIVREVIQNSKEVLSLLQEKNPAFKPVLAIIQAGDDNLMQEINQNLAEEAGLNITHICLPPDSSEAEIIDEILKINEDTRVHGLALQISENLFSNKVLNALKPEKDVDGVTDINLGKLVRGDAHECFVSPVAKAVIELLEKSGVNLDGKKILVVGAHGSLEAALQCLFQRKGSMTMSIQWKTRQLQSKLHEADIVVLGSPKPEEIPLTWIQPGTTVLNCSHDFLSGKVGCGSPRIHFGGLIEEDDVILLAAALRIQNMVSSGRRWLREQQHRRWRLHCLKLQPLSPVPSDIEISRGQTPKAVDVLAKEIGLLADEIEIYGKSKAKVRLSVLERLKDQADGKYVLVAGITPTPLGEGKSTVTIGLVQALTAHLNVNSFACLRQPSQGPTFGVKGGAAGGGYAQVIPMEEFNLHLTGDIHAITAANNLLAAAIDTRILHENTQTDKALYNRLVPLVNGVREFSEIQLARLKKLGINKTDPSTLTEEEVSKFARLDIDPSTITWQRVLDTNDRFLRKITIGQGNTEKGHYRQAQFDIAVASEIMAVLALTDSLADMKARLGRMVVASDKSGQPVTADDLGVTGALTVLMKDAIKPNLMQTLEGTPVFVHAGPFANIAHGNSSVLADKIALKLVGEEGFVVTEAGFGADIGMEKFFNIKCRASGLVPNVVVLVATVRALKMHGGGPSVTAGVPLKKEYTEENIQLVADGCCNLQKQIQITQLFGVPVVVALNVFKTDTRAEIDLVCELAKRAGAFDAVPCYHWSVGGKGSVDLARAVREAASKRSRFQFLYDVQVPIVDKIRTIAQAVYGAKDIELSPEAQAKIDRYTQQGFGNLPICMAKTHLSLSHQPDKKGVPRDFILPISDVRASIGAGFIYPLVGTMSTMPGLPTRPCFYDIDLDTETEQVKGLF

SEQ ID NO: 1104 - protein, 791 aa, Homo Sapiens
MPLYDNQKARSVMNECERHVIFARTDADAPPPPEDWEEHVNRTGWTMAQNKLFNKILKALQSDRLARLANEGACNEPVLRRVAVDKCARRVRQALASVSWDTKLIQWLHTTLVETLSLPMLAAYLDALQTLKGKIPTLIDRMLVSSNTKTGAAGAEALSLLLKRPWDPAVGVLSHNKPSKLPGSPLILIASSGPSSSVFPTSRRHRFWQSQLSCLGKVIPVATHLLNNGSGVGVLQCLEHMIGAVRSKVLEIHSHFPHKPIILIGWNTGALVACHVSVMEYVTAVVCLGFPLLTVDGPRGDVDDPLLDMKTPVLFVIGQNSLQCHPEAMEDFREKIRAENSLVVVGGADDNLRISKAKKKSEGLTQSMVDRCIQDEIVDFLTGVLTRAEGHMGSEPRDQDAEKKKKPRDVARRDLAFEVPERGSRPASPAAKLPASPSGSEDLSSVSSSPTSSPKTKVTTVTSAQKSSQIGSSQLLKRHVQRTEAVLTHKQAQVPISSEPPEEGEKEDLRVQLKRHHPSSPLPGSKTSKRPKIKVSLISQGDTAGGPCAPSQGSAPEAAGGKPITMTLGQASAGAKELTGLLTTAKSSSSEGGVSASPVPSVVSSSTAPSALHTLQSRLVATSPGSSLPGATSASSLLQGLSFSLQDISSKTSGLPANPSPGPAPQATSVKLPTPMQSLGAITTGTSTIVRTIPVATTLSSLGATPGGKPTAIHQLLTNGGLAKLASSLPGLAQISNQASGLKVPTTITLTLRGQPSRITTLSPMGSGAAPSEESSSQVLPSSSQRLPPAP

SEQ ID NO: 1105 - protein, 388 aa, Homo Sapiens
MVEAEELAQLRLLNLELLRQLWVGQDAVRRSVARAASESSLESSSSYNSETPSTPETSSTSLSTSCPRGRSSVWGPPDACRGDLRDVARSGVASLPPAKCQHQESLGRPRPHSAPSLGTSSLRDPEPSGRLGDPGPQEAQTPRSILAQQSKLSKPRVTFSEESAVPKRSWRLRPYLGYDWIAGSLDTSSSITSQPEAFFSKLQEFRETNKEECICSHPEPQLPGLRESSGSGVEEDHECVYCYRVNRRLFPVPVDPGTPCRLCRTPRDQQGPGTLAQPAHVRVSIPLSILEPPHRYHIHRRKSFDASDTLALPRHCLLGWDIFPPKSEKSSAPRNLDLWSSVSAEAQHQKLSGTSSPFHPASPMQMLPPTPTWSVPQVPRPHVPRQKP

SEQ ID NO: 1106 - protein, 164 aa, Homo Sapiens
MESGDEAAIERHRVHLRSATLRDAVPATLHLLPCEVAVDGPAPVGRFFTPAIRQGPEGLEVSFRGRCLRGEEVAVPPGLVGYVMVTEEKKVSMGKPDPLRDSGTDDQEEEPLERDFDRFIGATANFSRFTLWGLETIPGPDAKVRGALTWPSLAAAIHAQVPED

SEQ ID NO: 1107 - protein, 204 aa, Homo Sapiens
MFVLVEMVDTVRIPPWQFERKLNDSIAEELNKKLANKVVYNVGLCICLFDITKLEDAYVFPGDGASHTKVHFRCVVFHPFLDEILIGKIKGCSPEGVHVSLGFFDDILIPPESLQQPAKFDEAEQVWVWEYETEEGAHDLYMDTGEEIRFRVVDESFVDTSPTGPSSADATTSSEELPKKEAPYTLVGSISEPGLGLLSWWTSN

SEQ ID NO: 1108 - protein, 461 aa, Homo Sapiens
MDSVAFEDVAVNFTLEEWALLDPSQKNLYRDVMRETFRNLASVGKQWEDQNIEDPFKIPRRNISHIPERLCESKEGGQGEETFSQIPDGILNKKTPGVKPCESSVCGEVGMGPSSLNRHIRDHTGREPNEYQEYGKKSYTRNQCGRALSYHRSFPVRERTHPGGKPYDCKECGETFISLVSIRRHMLTHRGGVPYKCKVCGKAFDYPSLFRIHERSHTGEKPYECKQCGKAFSCSSYIRIHERTHTGDKPYECKQCGKAFSCSKYIRIHERTHTGEKPYECKQCGKAFRCASSVRSHERTHTGEKLFECKECGKALTCLASVRRHMIKHTGNGPYKCKVCGKAFDFPSSFRIHERTHTGEKPYDCKQCGKAFSCSSSFRKHERIHTGEKPYKCTKCGKAFSRSSYFRIHERTHTGEKPYECKQCGKAFSRSTYFRVHEKIHTGEKPYENPNPNASVVPVLS

SEQ ID NO: 1109 - protein, 915 aa, Homo Sapiens
MAETLSGLGDSGAAGAAALSSASSETGTRRLSDLRVIDLRAELRKRNVDSSGNKSVLMERLKKAIEDEGGNPDEIEITSEGNKKTSKRSSKGRKPEEEGVEDNGLEENSGDGQEDVETSLENLQDIDIMDISVLDEAEIDNGSVADCVEDDDADNLQESLSDSRELVEGEMKELPEQLQEHAIEDKETINNLDTSSSDFTILQEIEEPSLEPENEKILDILGETCKSEPVKEESSELEQPFAQDTSSVGPDRKLAEEEDLFDSAHPEEGDLDLASESTAHAQSSKADSLLAVVKREPAEQPGDGERTDCEPVGLEPAVEQSSAASELAEASSEELAEAPTEAPSPEARDSKEDGRKFDFDACNEVPPAPKESSTSEGADQKMSSPEDDSDTKRLSKEEKGRSSCGRNFWVSGLSSTTRATDLKNLFSKYGKVVGAKVVTNARSPGARCYGFVTMSTAEEATKCINHLHKTELHGKMISVEKAKNEPVGKKTSDKRDSDGKKEKSSNSDRSTNLKRDDKCDRKDDAKKGDDGSGEKSKDQDDQKPGPSERSRATKSGSRGTERTVVMDKSKGVPVISVKTSGSKERASKSQDRKSASREKRSVVSFDKVKEPRKSRDSESHSRVRERSEREQRMQAQWEREERERLEIARERLAFQRQRLERERMERERLERERMHVEHERRREQERIHREREELRRQQELRYEQERRPAVRRPYDLDRRDDAYWPEAKRAALDERYHSDFNRQDRFHDFDHRDRGRYPDHSVDRREGSRSMMGEREGQHYPERHGGPERHGRDSRDGWGGYGSDKRMSEGRGLPPPPRRDWGDHGRREDDRSWQGTADGGMMDRDHKRWQGGERSMSGHSGPGHMMNRGGMSGRGSFAPGGASRGHPIPHGGMQGGFGGQSRGSRPSDARFTRRY

SEQ ID NO: 1110 - protein, 669 aa, Homo Sapiens
MKIFVGNVDGADTTPEELAALFAPYGTVMSCAVMKQFAFVHMRENAGALRAIEALHGHELRPGRALVVEMSRPRPLNTWKIFVGNVSAACTSQELRSLFERRGRVIECDVVKDYAFVHMEKEADAKAAIAQLNGKEVKGKRINVELSTKGQKKGPGLAVQSGDKTKKPGAGDTAFPGTGGFSATFDYQQAFGNSTGGFDGQARQPTPPFFGRDRSPLRRSPPRASYVAPLTAQPATYRAQPSVSLGAAYRAQPSASLGVGYRTQPMTAQAASYRAQPSVSLGAPYRGQLASPSSQSAAASSLGPYGGAQPSASALSSYGGQAAAASSLNSYGAQGSSLASYGNQPSSYGAQAASSYGVRAAASSYNTQGAASSLGSYGAQAASYGAQSAASSLAYGAQAASYNAQPSASYNAQSAPYAAQQAASYSSQPAAYVAQPATAAAYASQPAAYAAQATTPMAGSYGAQPVVQTQLNSYGAQASMGLSGSYGAQSAAAATGSYGAAAAYGAQPSATLAAPYRTQSSASLAASYAAQQHPQAAASYRGQPGNAYDGAGQPSAAYLSMSQGAVANANSTPPPYERTRLSPPRASYDDPYKKAVAMSKRYGSDRRLAELSDYRRLSESQLSFRRSPTKSSLDYRRLPDAHSDYARYSGSYNDYLRAAQMHSGYQRRM

SEQ ID NO: 1111 - protein, 347 aa, Homo Sapiens
MKMEEMSLSGLDNSKLEAIAQEIYADLVEDSCLGFCFEVHRAVKCGYFFLDDTDPDSMKDFEIVDQPGLDIFGQVFNQWKSKECVCPNCSRSIAASRFAPHLEKCLGMGRNSSRIANRRIANSNNMNKSESDQEDNDDINDNDWSYGSEKKAKKRKSDKNPNSPRRSKSLKHKNGELSNSDPFKYNNSTGISYETLGPEELRSLLTTQCGVISEHTKKMCTRSLRCPQHTDEQRRTVRIYFLGPSAVLPEVESSLDNDSFDMTDSQALISRLQWDGSSDLSPSDSGSSKTSENQGWGLGTNSSESRKTKKKKSHLSLVGTASGLGSNKKKKPKPPAPPTPSIYDDIN

SEQ ID NO: 1112 - protein, 257 aa, Homo Sapiens
MEFPDLGAHCSEPSCQRLDFLPLKCDACSGIFCADHVAYAQHHCGSAYQKDIQVPVCPLCNVPVPVARGEPPDRAVGEHIDRDCRSDPAQQKRKIFTNKCERAGCRQREMMKLTCERCSRNFCIKHRHPLDHDCSGEGHPTSRAGLAAISRAQAVASTSTVPSPSQTMPSCTSPSRATTRSPSWTAPPVIALQNGLSEDEALQRALEMSLAETKPQVPSCQEEEDLALAQALSASEAEYQRQQAQSRSSKPSNCSLC

SEQ ID NO: 1113 - protein, 3997 aa, Homo Sapiens
MLESYVTPILMSYVNRYIKNLKPSDLQLSLWGGDVVLSKLELKLDVLEQELKLPFTFLSGHIHELRIHVPWTKLGSEPVVITINTMECILKLKDGIQDDHESCGSNSTNRSTAESTKSSIKPRRMQQAAPTDPDLPPGYVQSLIRRVVNNVNIVINNLILKYVEDDIVLSVNITSAECYTVGELWDRAFMDISATDLVLRKVINFSDCTVCLDKRNASGKIEFYQDPLLYKCSFRTRLHFTYENLNSKMPSVIKIHTLVESLKLSITDQQLPMFIRIMQLGIALYYGEIGNFKEGEIEDLTCHNKDMLGNITGSEDETRIDMQYPAQHKGQELYSQQDEEQPQGWVSWAWSFVPAIVSYDDGEEDFVGNDPASTMHQQKAQTLKDPIVSIGFYCTKATVTFKLTEMQVESSYYSPQKVKSKEVLCWEQEGTTVEALMMGEPFFDCQIGFVGCRAMCLKGIMGVKDFEENMNRSETEACFFICGDNLSTKGFTYLTNSLFDYRSPENNGTRAEFILDSTHHKETYTEIAGMQRFGAFYMDYLYTMENTSGKGSTNQQDFSSGKSEDLGTVQEKSTKSLVIGPLDFRLDSSAVHRILKMIVCALEHEYEPYSRLKSDIKDENETILNPEEVALLEEYIPTRHTSVTLLKCTCTISMAEFNLLDHLLPVIMGEKNSSNFMNTTNFQSLRPLPSIRILVDKINLEHSVPMYAEQLVHVVSSLTQPSDNLLHYCYVHCYLKIFGFQAGLTSLDCSGSYCLPVPVIPSFSTALYGKLLKLPTCWTKRSQIAITEGIFELPNLTIQATRAQTLLLQAIYQSWSHLGNVSSSAVIEALINEIFLSIGVKSKNPLPTLEGSIQNVELKYCSTSLVKCASGTMGSIKICAKAPVDSGKEKLIPLLQGPSDTKDLHSTKWLNESRKPESLLAPDLMAFTIQVPQYIDYCHNSGAVLLCSIQGLAVNIDPILYTWLIYQPQKRTSRHMQQQPVVAVPLVMPVCRRKEDEVSIGSAPLAKQQSYQASEYASSPVKTKTVTESRPLSVPVKAMLNISESCRSPEERMKEFIGIVWNAVKHLTLQLEVQSCCVFIPNDSLPSPSTIVSGDIPGTVRSWYHGQTSMPGTLVLCLPQIKIISAGHKYMEPLQEIPFVIPRPILEEGDAFPWTISLHNFSIYTLLGKQVTLCLVEPMGCTSTLAVTSQKLLATGPDTRHSFVVCLHVDLESLEIKCSNPQVQLFYELTDIMNKVWNKIQKRGNLNLSPTSPETMAGPVPTSPVRSSIGTAPPDTSTCSPSADIGTTTEGDSIQAGEESPFSDSVTLEQTTSNIGGTSGRVSLWMQWVLPKITIKLFAPDPENKGTEVCMVSELEDLSASIDVQDVYTKVKCKIESFNIDHYRSRPGEGWQSGHFEGVFLQCKEKSVTTTKLLDGTHQQHGFLSLTYTKAVTKNVRHKLTSRNERRSFHKLSEGLMDGSPHFLHEILLSAQAFDIVLYFPLLNAIASIFQAKLPKTQKEKRKSPGQPMRTHTLTSRNLPLIYVNTSVIRIFIPKTEEMQPTVEANQAAKEDTVVLKIGSVAMAPQADNPLGRSVLRKDIYQRALNLGILRDPGSEIEDRQYQIDLQSINIGTAQWHQLKPEKESVSGGVVTETERNSQNPALEWNMASSIRRHQERRAILTPVLTDFSVRITGAPAVIFTKVVSPENLHTEEILVCGHSLEVNITTNLDFFLSVAQVQLLHQLIVANMTGLEPSNKAAEISKQEQKKVDIFDGGMAETSSRYSGAQDSGIGSDSVKIRIVQIEQHSGASQHRIARPSRQSSIVKNLNFIPFDIFITASRISLMTYSCMALSKSKSQEQKNNEKTDKSSLNLPEVDSDVAKPNQACISTVTAEDLLRSSISFPSGKKIGVLSLESLHASTRSSARQALGITIVRQPGRRGTGDLQLEPFLYFIVSQPSLLLSCHHRKQRVEVSIFDAVLKGVASDYKCIDPGKTLPEALDYCTVWLQTVPGEIDSKSGIPPSFITLQIKDFLNGPADVNLDISKPLKANLSFTKLDQINLFLKKIKNAHSLAHSEETSAMSNTMVNKDDLPVSKYYRGKLSKPKIHGDGVQKISAQENMWRAVSCFQKISVQTTQIVISMETVPHTSKPCLLASLSNLNGSLSVKATQKVPGIILGSSFLLSINDFLLKTSLKERSRILIGPCCATANLEAKWCKHSGNPGPEQSIPKISIDLRGGLLQVFWGQEHLNCLVLLHELLNGYLNEEGNFEVQVSEPVPQMSSPVEKNQTFKSEQSSDDLRTGLFQYVQDAESLKLPGVYEVLFYNETEDCPGMMLWRYPEPRVLTLVRITPVPFNTTEDPDISTADLGDVLQVPCSLEYWDELQKVFVAFREFNLSESKVCELQLPDINLVNDQKKLVSSDLWRIVLNSSQNGADDQSSASESGSQSTCDPLVTPTALAACTRVDSCFTPWFVPSLCVSFQFAHLEFHLCHHLDQLGTAAPQYLQPFVSDRNMPSELEYMIVSFREPHMYLRQWNNGSVCQEIQFLAQADCKLLECRNVTMQSVVKPFSIFGQMAVSSDVVEKLLDCTVIVDSVFVNLGQHVVHSLNTAIQAWQQNKCPEVEELVFSHFVICNDTQETLRFGQVDTDENILLASLHSHQYSWRSHKSPQLLHICIEGWGNWRWSEPFSVDHAGTFIRTIQYRGRTASLIIKVQQLNGVQKQIIICGRQIICSYLSQSIELKVVQHYIGQDGQAVVREHFDCLTAKQKLPSYILENNELTELCVKAKGDEDWSRDVCLESKAPEYSIVIQVPSSNSSIIYVWCTVLTLEPNSQVQQRMIVFSPLFIMRSHLPDPIIIHLEKRSLGLSETQIIPGKGQEKPLQNIEPDLVHHLTFQAREEYDPSDCAVPISTSLIKQIATKVHPGGTVNQILDEFYGPEKSLQPIWPYNKKDSDRNEQLSQWDSPMRVKLSIWKPYVRTLLIELLPWALLINESKWDLWLFEGEKIVLQVPAGKIIIPPNFQEAFQIGIYWANTNTVHKSVAIKLVHNLTSPKWKDGGNGEVVTLDEEAFVDTEIRLGAFPGHQKLCQFCISSMVQQGIQIIQIEDKTTIINNTPYQIFYKPQLSVCNPHSGKEYFRVPDSATFSICPGGEQPAMKSSSLPCWDLMPDISQSVLDASLLQKQIMLGFSPAPGADSSQCWSLPAIVRPEFPRQSVAVPLGNFRENGFCTRAIVLTYQEHLGVTYLTLSEDPSPRVIIHNRCPVKMLIKENIKDIPKFEVYCKKIPSECSIHHELYHQISSYPDCKTKDLLPSLLLRVEPLDEVTTEWSDAIDINSQGTQVVFLTGFGYVYVDVVHQCGTVFITVAPEGKAGPILTNTNRAPEKIVTFKMFITQLSLAVFDDLTHHKASAELLRLTLDNIFLCVAPGAGPLPGEEPVAALFELYCVEICCGDLQLDNQLYNKSNFHFAVLVCQGEKAEPIQCSKMQSLLISNKELEEYKEKCFIKLCITLNEGKSILCDINEFSFELKPARLYVEDTFVYYIKTLFDTYLPNSRLAGHSTHLSGGKQVLPMQVTQHARALVNPVKLRKLVIQPVNLLVSIHASLKLYIASDHTPLSFSVFERGPIFTTARQLVHALAMHYAAGALFRAGWVVGSLDILGSPASLVRSIGNGVADFFRLPYEGLTRGPGAFVSGVSRGTTSFVKHISKGTLTSITNLATSLARNMDRLSLDEEHYNRQEEWRRQLPESLGEGLRQGLSRLGISLLGAIAGIVDQPMQNFQKTSEAQASAGHKAKGVISGVGKGIMGVFTKPIGGAAELVSQTGYGILHGAGLSQLPKQRHQPSDLHADQAPNSHVKYVWKMLQSLGRPEVHMALDVVLVRGSGQEHEGCLLLTSEVLFVVSVSEDTQQQAFPVTEIDCAQDSKQNNLLTVQLKQPRVACDVEVDGVRERLSEQQYNRLVDYITKTSCHLAPSCSSMQIPCPVVAAEPPPSTVKTYHYLVDPHFAQVFLSKFTMVKNKALRKGFP

SEQ ID NO: 1114 - protein, 205 aa, Homo Sapiens
MGTAGAMQLCWVILGFLLFRGHNSQPTMTQTSSSQGGLGGLSLTTEPVSSNPGYIPSSEANRPSHLSSTGTPGAGVPSSGRDGGTSRDTFQTVPPNSTTMSLSMREDATILPSPTSETVLTVAAFGVISFIVILVVVVIILVGVVSLRFKCRKSKESEDPQKPGSSGLSESCSTANGEKDSITLISMKNINMNNGKQSLSAEKVL

SEQ ID NO: 1115 - protein, 462 aa, Homo Sapiens
MASPALAAALAVAAAAGPNASGAGERGSGGVANASGASWGPPRGQYSAGAVAGLAAVVGFLIVFTVVGNVLVVIAVLTSRALRAPQNLFLVSLASADILVATLVMPFSLANELMAYWYFGQVWCGVYLALDVLFCTSSIVHLCAISLDRYWSVTQAVEYNLKRTPRRVKATIVAVWLISAVISFPPLVSLYRQPDGAAYPQCGLNDETWYILSSCIGSFFAPCLIMGLVYARIYRVAKLRTRTLSEKRAPVGPDGASPTTENGLGAAAGAGENGHCAPPPADVEPDESSAAAERRRRRGALRRGGRRRAGAEGGAGGADGQGAGPGAAESGALTASRSPGPGGRLSRASSRSVEFFLSRRRRARSSVCRRKVAQAREKRFTFVLAVVMGVFVLCWFPFFFSYSLYGICREACQVPGPLFKFFFWIGYCNSSLNPVIYTVFNQDFRRSFKHILFRRRRRGFRQ

SEQ ID NO: 1116 - protein, 328 aa, Homo Sapiens
MLPRVGCPALPLPPPPLLPLLPLLLLLLGASGGGGGARAEVLFRCPPCTPERLAACGPPPVAPPAAVAAVAGGARMPCAELVREPGCGCCSVCARLEGEACGVYTPRCGQGLRCYPHPGSELPLQALVMGEGTCEKRRDAEYGASPEQVADNGDDHSEGGLVENHVDSTMNMLGGGGSAGRKPLKSGMKELAVFREKVTEQHRQMGKGGKHHLGLEEPKKLRPPPARTPCQQELDQVLERISTMRLPDERGPLEHLYSLHIPNCDKHGLYNLKQCKMSLNGQRGECWCVNPNTGKLIQGAPTIRGDPECHLFYNEQQEARGVHTQRMQ

SEQ ID NO: 1117 - protein, 67 aa, Homo Sapiens
MGHQQLYWSHPRKFGQGSRSCRVCSNRHGLIRKYGLNMCRQCFRQYAKDIGFIKKDLSCLPWHCLWR

SEQ ID NO: 1118 - protein, 792 aa, Homo Sapiens
MQGEDARYLKRKVKGGNIDVHPSEKALIVHYEVEATILGEMGDPMLGERKECQKIIRLKSLNANTDITSLARKVVEECKLIHPSKLNEVEQLLYYLQNRRDSLSGKEKKEKSSKPKDPPPFEGMEIDEVANINDMDEYIELLYEDIPDKVRGSALILQLARNPDNLEELLLNETALGALARVLREDWKQSVELATNIIYIFFCFSSFSQFHGLITHYKIGALCMNIIDHELKRHELWQEELSKKKKAVDEDPENQTLRKDYEKTFKKYQGLVVKQEQLLRVALYLLLNLAEDTRTELKMRNKNIVHMLVKALDRDNFELLILVVSFLKKLSIFMENKNDMVEMDIVEKLVKMIPCEHEDLLNITLRLLLNLSFDTGLRNKMVQVGLLPKLTALLGNDNYKQIAMCVLYHISMDDRFKSMFAYTDCIPQLMKMLFECSDERIDLELISFCINLAANKRNVQLICEGNGLKMLMKRALKFKDPLLMKMIRNISQHDGPTKNLFIDYVGDLAAQISNDEEEEFVIECLGTLANLTIPDLDWELVLKEYKLVPYLKDKLKPGAAEDDLVLEVVIMIGTVSMDDSCAALLAKSGIIPALIELLNAQQEDDEFVCQIIYVFYQMVFHQATRDVIIKETQAPAYLIDLMHDKNNEIRKVCDNTLDIIAEYDEEWAKKIQSEKFRWHNSQWLEMVESRQMDESEQYLYGDDRIEPYIHEGDILERPDLFYNSDGLIASEGAISPDFFNDYHLQNGDVVGQHSFPGSLGMDGFGQPVGILGRPATAYGFRPDEPYYYGYGS

SEQ ID NO: 1119 - protein, 375 aa, Homo Sapiens
MMCQSEARQGPELRAAKWLHFPQLALRRRLGQLSCMSRPALKLRSWPLTVLYYLLPFGALRPLSRVGWRPVSRVALYKSVPTRLLSRAWGRLNQVELPHWLRRPVYSLYIWTFGVNMKEAAVEDLHHYRNLSEFFRRKLKPQARPVCGLHSVISPSDGRILNFGQVKNCEVEQVKGVTYSLESFLGPRMCTEDLPFPPAASCDSFKNQLVTREGNELYHCVIYLAPGDYHCFHSPTDWTVSHRRHFPGSLMSVNPGMARWIKELFCHNERVVLTGDWKHGFFSLTAVGATNVGSIRIYFDRDLHTNSPRHSKGSYNDFSFVTHTNREGVPMRKGEHLGEFNLGSTIVLIFEAPKDFNFQLKTGQKIRFGEALGSL

SEQ ID NO: 1120 - protein, 278 aa, Homo Sapiens [sequence omitted]

SEQ ID NO: 1121 - protein, 239 aa, Homo Sapiens
MPTATGLTLLTSASSAISDPGGEVSAPWGGLRTWTQPLRCWERLLPPPGDPRTVAENTQQDECGLPGSCPARPLSRKPECGREGILPCCSSSAWPEGSFRPFQMNLFSFLSFFFLFFFFLRWSLTLSPRLECSSAISAHCNLRLPGSSNSPALASQVAGITGICHHARQIFVFLVETGFCHVGQAGLELLISGDSPASAFQSAGIIGVSHRARPGSVFLARSEESLYLRPGQQSQEVKV

SEQ ID NO: 1122 - protein, 215 aa, Homo Sapiens
MPFHPVTAALMYRGIYTVPNLLSEQRPVDIPEDELEEIREAFKVFDRDGNGFISKQELGTAMRSLGYMPNEVELEVIIQRLDMDGDGQVDFEEFVTLLGPKLSTSGIPEKFHGTDFDTVFWKCDMQKLTVDELKRLLYDTFCEHLSMKDIENIIMTEEESHLGTAEECPVDVETCSNQQIRQTCVRKSLICAFAIAFIISVMLIAANQVLRSGMK

SEQ ID NO: 1123 - protein, 285 aa, Homo Sapiens
MAGGWAQGSRRAARLPEGGRLMAPASRLLALWALAAVALPGSGAEGDGGWRPGGPGAVAEEERCTVERRADLTYAEFVQQYAFVRPVILQGLTDNSRFRALCSRDRLLASFGDRVVRLSTANTYSYHKVDLPFQEYVEQLLHPQDPTSLGNDTLYFFGDNNFTEWASLFRHYSPPPFGLLGTAPAYSFGIAGAGSGVPFHWHGPGYSEVIYGRKRWFLYPPEKTPEFHPNKTTLAWLRDTYPALPPSARPLECTIRAGEVLYFPDRWWHATLNLDTSVFISTFLG

SEQ ID NO: 1124 - protein, 467 aa, Homo Sapiens
MQPQHGPWQTRMRKISNHGSLRVAKVAYPLGLCVGVFIYVAYIKWHRATATQAFFSITRAAPGARWGQQAHSPLGTAADGHEVFYGIMFDAGSTGTRVHVFQFTRPPRETPTLTHETFKALKPGLSAYADDVEKSAQGIRELLDVAKQDIPFDFWKATPLVLKATAGLRLLPGEKAQKLLQKVKEVFKASPFLVGDDCVSIMNGTDEGVSAWITINFLTGSLKTPGGSSVGMLDLGGGSTQIAFLPRVEGTLQASPPGYLTALRMFNRTYKLYSYSYLGLGLMSARLAILGGVEGQPAKDGKELVSPCLSPSFKGEWEHAEVTYRVSGQKAAASLHELCAARVSEVLQNRVHRTEEVKHVDFYAFSYYYDLAAGVGLIDAEKGGSLVVGDFEIAAKYVCRTLETQPQSSPFSCMDLTYVSLLLQEFGFPRSKVLKLTRKIDNVETSWALGAIFHYIDSLNRQKSPAS

SEQ ID NO: 1125 - protein, 119 aa, Homo Sapiens
MTQQGAALQNYNNELVKCIEELCQKREELCRQIQEEEDEKQRLQNEVRQLTEKLARVNENLARKIASRNEFDRTIAETEAAYLKILESSQTLLSVLKREAGNLTKATAPDQKSSGGRDS

SEQ ID NO: 1126 - protein, 429 aa, Homo Sapiens
MAATDIARQVGEGCRTVPLAGHVGFDSLPDQLVNKSVSQGFCFNILCVGETGLGKSTLMDTLFNTKFEGEPATHTQPGVQLQSNTYDLQESNVRLKLTIVSTVGFGDQINKEDSYKPIVEFIDAQFEAYLQEELKIRRVLHTYHDSRIHVCLYFIAPTGHSLKSLDLVTMKKLDSKVNIIPIIAKADAISKSELTKFKIKITSELVSNGVQIYQFPTDDESVAEINGTMNAHLPFAVIGSTEELKIGNKMMRARQYPWGTVQVENEAHCDFVKLREMLIRVNMEDLREQTHTRHYELYRRCKLEEMGFKDTDPDSKPFSLQETYEAKRNEFLGELQKKEEEMRQMFVQRVKEKEAELKEAEKELHEKFDRLKKLHQDEKKKLEDKKKSLDDEVNAFKQRKTAAELLQSQGSQAGGSQTLKRDKEKKNFF

SEQ ID NO: 1127 - protein, 858 aa, Homo Sapiens
MDLPALLPAPTARGGQHGGGPGPLRRAPAPLGASPARRRLLLVRGPEDGGPGARPGEASGPSPPPAEDDSDGDSFLVLLEVPHGGAAAEAAGSQEAEPGSRVNLASRPEQGPSGPAAPPGPGVAPAGAVTISSQDLLVRLDRGVLALSAPPGPATAGAAAPRRAPQASGPSTPGYRCPEPQCALAFAKKHQLKVHLLTHGGGQGRRPFKCPLEGCGWAFTTSYKLKRHLQSHDKLRPFGCPVGGCGKKFTTVYNLKAHMKGHEQESLFKCEVCAERFPTHAKLSSHQRSHFEPERPYKCDFPGCEKTFITVSALFSHNRAHFREQELFSCSFPGCSKQYDKACRLKIHLRSHTGERPFICDSDSCGWTFTSMSKLLRHRRKHDDDRRFTCPVEGCGKSFTRAEHLKGHSITHLGTKPFECPVEGCCARFSARSSLYIHSKKHVQDVGAPKSRCPVSTCNRLFTSKHSMKAHMVRQHSRRQDLLPQLEAPSSLTPSSELSSPGQSELTNMDLAALFSDTPANASGSAGGSDEALNSGILTIDVTSVSSSLGGNLPANNSSLGPMEPLVLVAHSDIPPSLDSPLVLGTAATVLQQGSFSVDDVQTVSAGALGCLVALPMKNLSDDPLALTSNSNLAAHITTPTSSSTPRENASVPELLAPIKVEPDSPSRPGAVGQQEGSHGLPQSTLPSPAEQHGAQDTELSAGTGNFYLESGGSARTDYRAIQLAKEKKQRGAGSNAGASQSTQRKIKEGKMSPPHFHASQNSWLCGSLVVPSGGRPGPAPAAGVQCGAQGVQVQLVQDDPSGEGVLPSARGPATFLPFLTVDLPVYVLQEVLPSSGGPAGPEATQFPGSTINLQDLQ

SEQ ID NO: 1128 - protein, 536 aa, Homo Sapiens
MATRAQPGPLSQAGSAGVAALATVGVASGPGPGRPGPLQDETLGVASVPSQWRAVQGIRWETKSCQTASIATASASAQARNHVDAQVQTEAPVPVSVQPPSQYDIPRLAAFLRRVEAMVIRELNKNWQSHAFDGFEVNWTEQQQMVSCLYTLGYPPAQAQGLHVTSISWNSTGSVVACAYGRLDHGDWSTLKSFVCAWNLDRRDLRPQQPSAVVEVPSAVLCLAFHPTQPSHVAGGLYSGEVLVWDLSRLEDPLLWRTGLTDDTHTDPVSQVVWLPEPGHSHRFQVLSVATDGKVLLWQGIGVGQLQLTEGFALVMQQLPRSTKLKKHPRGETEVGATAVAFSSFDPRLFILGTEGGFPLKCSLAAGEAALTRMPSSVPLRAPAQFTFSPHGGPIYSVSCSPFHRNLFLSAGTDGHVHLYSMLQAPPLTSLQLSLKYLFAVRWSPVRPLVFAAASGKGDVQLFDLQKSSQKPTVLIKQTQDESPVYCLEFNSQQTQLLAAGDAQGTVKVWQLSTEFTEQGPREAEDLDCLAAEVAA

SEQ ID NO: 1129 - protein, 278 aa, Homo Sapiens
MEPQEERETQVAAWLKKIFGDHPIPQYEVNPRTTEILHHLSERNRVRDRDVYLVIEDLKQKASEYESEAKYLQDLLMESVNFSPANLSSTGSRYLNALVDSAVALETKDTSLASFIPAVNDLTSDLFRTKSKSEEIKIELEKLEKNLTATLVLEKCLQEDVKKAELHLSTERAKVDNRRQNMDFLKAKSEEFRFGIKAAEEQLSARGMDASLSHQSLVALSEKLARLKQQTIPLKKKLESYLDLMPNPSLAQVKIEEAKRELDSIEAELTRRVDMMEL

SEQ ID NO: 1130 - protein, 986 aa, Homo Sapiens
MPGVARLPLLLGLLLLPRPGRPLDLADYTYDLAEEDDSEPLNYKDPCKAAAFLGDIALDEEDLRAFQVQQAVDLRRHTARKSSIKAAVPGNTSTPSCQSTNGQPQRGACGRWRGRSRSRRAATSRPERVWPDGVIPFVIGGNFTGSQRAVFRQAMRHWEKHTCVTFLERTDEDSYIVFTYRPCGCCSYVGRRGGGPQAISIGKNCDKFGIVVHELGHVVGFWHEHTRPDRDRHVSIVRENIQPGQEYNFLKMEPQEVESLGETYDFDSIMHYARNTFSRGIFLDTIVPKYEVNGVKPPIGQRTRLSKGDIAQARKLYKCPACGETLQDSTGNFSSPEYPNGYSAHMHCVWRISVTPGEKIILNFTSLDLYRSRLCWYDYVEVRDGFWRKAPLRGRFCGSKLPEPIVSTDSRLWVEFRSSSNWVGKGFFAVYEAICGGDVKKDYGHIQSPNYPDDYRPSKVCIWRIQVSEGFHVGLTFQSFEIERHDSCAYDYLEVRDGHSESSTLIGRYCGYEKPDDIKSTSSRLWLKFVSDGSINKAGFAVNFFKEVDECSRPNRGGCEQRCLNTLGSYKCSCDPGYELAPDKRRCEAACGGFLTKLNGSITSPGWPKEYPPNKNCIWQLVAPTQYRISLQFDFFETEGNDVCKYDFVEVRSGLTADSKLHGKFCGSEKPEVITSQYNNMRVEFKSDNTVSKKGFKAHFFSDKDECSKDNGGCQQDCVNTFGSYECQCRSGFVLHDNKHDCKEAGCDHKVTSTSGTITSPNWPDKYPSKKECTWAISSTPGHRVKLTFMEMDIESQPECAYDHLEVFDGRDAKAPVLGRFCGSKKPEPVLATGSRMFLRFYSDNSVQRKGFQASHATECGGQVRADVKTKDLYSHAQFGDNNYPGGVDCEWVIVAEEGYGVELVFQTFEVEEETDCGYDYMELFDGYDSTAPRLGRYCGSGPPEEVYSAGDSVLVKFHSDDTITKKGFHLRYTSTKFQDTLHSRK

SEQ ID NO: 1131 - protein, 165 aa, Homo Sapiens
MAERKQSGKAAEDEEVPAFFKNLGSGSPKPRQKFCGMFCPVEGSSENKTIDFDSLSVGRGSGQVVAQQRDVAHLGPDPQPPYSRQGRRAGGEPSVESGRKVEIRRASGKEALQNINDQSDRLLIKGGKIVNDDQSFYADIYMEDGLIKQIGENLIVPGGVKTIEA

SEQ ID NO: 1132 - protein, 275 aa, Homo Sapiens
MPYANQPTVRITELTDENVKFIIENTDLAVANSIRRVFIAEVPIIAIDWVQIDANSSVLHDEFIAHRLGLIPLISDDIVDKLQYSRDCTCEEFCPECSVEFTLDVRCNEDQTRHVTSRDLISNSPRVIPVTSRNRDNDPNDYVEQDDILIVKLRKGQELRLRAYAKKGFGKEHAKWNPTAGVAFEYDPDNALRHTVYPKPEEWPKSEYSELDEDESQAPYDPNGKPERFYYNVESCGSLRPETIVLSALSGLKKKLSDLQTQLSHEIQSDVLTIN

SEQ ID NO: 1133 - protein, 3830 aa, Homo Sapiens
MAFVATQGATVVDQTTLMKKYLQFVAALTDVNTPDETKLKMMQEVSENFENVTSSPQYSTFLEHIIPRFLTFLQDGEVQFLQEKPAQQLRKLVLEIIHRIPTNEHLRPHTKNVLSVMFRFLETENEENVLICLRIIIELHKQFRPPITQEIHHFLDFVKQIYKELPKVVNRYFENPQVIPENTVPPPEMVGMITTIAVKVNPEREDSETRTHSIIPRGSLSLKVLAELPIIVVLMYQLYKLNIHNVVAEFVPLIMNTIAIQVSAQARQHKLYNKELYADFIAAQIKTLSFLAYIIRIYQELVTKYSQQMVKGMLQLLSNCPAETAHLRKELLIAAKHILTTELRNQFIPCMDKLFDESILIGSGYTARETLRPLAYSTLADLVHHVRQHLPLSDLSLAVQLFAKNIDDESLPSSIQTMSCKLLLNLVDCIRSKSEQESGNGRDVLMRMLEVFVLKFHTIARYQLSAIFKKCKPQSELGAVEAALPGVPTAPAAPGPAPSPAPVPAPPPPPPPPPPATPVTPAPVPPFEKQGEKDKEDKQTFQVTDCRSLVKTLVCGVKTITWGITSCKAPGEAQFIPNKQLQPKETQIYIKLVKYAMQALDIYQVQIAGNGQTYIRVANCQTVRMKEEKEVLEHFAGVFTMMNPLTFKEIFQTTVPYMVERISKNYALQIVANSFLANPTTSALFATILVEYLLDRLPEMGSNVELSNLYLKLFKLVFGSVSLFAAENEQMLKPHLHKIVNSSMELAQTAKEPYNYFLLLRALFRSIGGGSHDLLYQEFLPLLPNLLQGLNMLQSGLHKQHMKDLFVELCLTVPVRLSSLLPYLPMLMDPLVSALNGSQTLVSQGLRTLELCVDNLQPDFLYDHIQPVRAELMQALWRTLRNPADSISHVAYRVLGKFGGSNRKMLKESQKLHYVVTEVQGPSITVEFSDCKASLQLPMEKAIETALDCLKSANTEPYYRRQAWEVIKCFLVAMMSLEDNKHALYQLLAHPNFTEKTIPNVIISHRYKAQDTPARKTFEQALTGAFMSAVIKDLRPSALPFVASLIRHYTMVAVAQQCGPFLLPCYQVGSQPSTAMFHSEENGSKGMDPLVLIDAIAICMAYEEKELCKIGEVALAVIFDVASIILGSKERACQLPLFSYIVERLCACCYEQAWYAKLGGVVSIKFLMERLPLTWVLQNQQTFLKALLFVMMDLTGEVSNGAVAMAKTTLEQLLMRCATPLKDEERAEEIVAAQEKSFHHVTHDLVREVTSPNSTVRKQAMHSLQVLAQVTGKSVTVIMEPHKEVLQDMVPPKKHLLRHQPANAQIGLMEGNTFCTTLQPRLFTMDLNVVEHKVFYTELLNLCEAEDSALTKLPCYKSLPSLVPLRIAALNALAACNYLPQSREKIIAALFKALNSTNSELQEAGEACMRKFLEGATIEVDQIHTHMRPLLMMLGDYRSLTLNVVNRLTSVTRLFPNSFNDKFCDQMMQHLRKWMEVVVITHKGGQRSDGNEMKICSAIINLFHLIPAAPQTLVKPLLEVVMKTERAMLIEAGSPFREPLIKFLTRHPSQTVELFMMEATLNDPQWSRMFMSFLKHKDARPLRDVLAANPNRFITLLLPGGAQTAVRPGSPSTSTMRLDLQFQAIKIISIIVKNDDSWLASQHSLVSQLRRVWVSENFQERHRKENMAATNWKEPKLLAYCLLNYCKRNYGDIELLFQLLRAFTGRFLCNMTFLKEYMEEEIPKNYSIAQKRALFFRFVDFNDPNFGDELKAKVLQHILNPAFLYSFEKGEGEQLLGPPNPEGDNPESITSVFITKVLDPEKQADMLDSLRIYLLQYATLLVEHAPHHIHDNNKNRNSKLRRLMTFAWPCLLSKACVDPACKYSGHLLLAHIIAKFAIHKKIVLQVFHSLLKAHAMEARAIVRQAMAILTPAVPARMEDGHQMLTHWTRKIIVEEGHTVPQLVHILHLIVQHFKVYYPVRHHLVQHMVSAMQRLGFTPSVTIEQRRLAVDLSEVVIKWELQRIKDQQPDSDMDPNSSGEGVNSVSSSIKRGLSVDSAQEVKRFRTATGAISAVFGRSQSLPGADSLLAKPIDKQHTDTVVNFLIRVACQVNDNTNTAGSPGEVLSRRCVNLLKTALRPDMWPKSELKLQWFDKLLMTVEQPNQVNYGNICTGLEVLSFLLTVLQSPAILSSFKPLQRGIAACMTCGNTKVLRAVHSLLSRLMSIFPTEPSTSSVASKYEELECLYAAVGKVIYEGLTNYEKATNANPSQLFGTLMILKSACSNNPSYIDRLISVFMRSLQKMVREHLNPQAASGSTEATSGTSELVMLSLELVKTRLAVMSMEMRKNFIQAILTSLIEKSPDAKILRAVVKIVEEWVKNNSPMAANQTPTLREKSILLVKMMTYIEKRFPEDLELNAQFLDLVNYVYRDETLSGSELTAKLEPAFLSGLRCAQPLIRAKFFEVFDNSMKRRVYERLLYVTCSQNWEAMGNHFWIKQCIELLLAVCEKSTPIGTSCQGAMLPSITNVINLADSHDRAAFAMVTHVKQEPRERENSESKEEDVEIDIELAPGDQTSTPKTKELSEKDIGNQLHMLTNRHDKFLDTLREVKTGALLSAFVQLCHISTTLAEKTWVQLFPRLWKILSDRQQHALAGEISPFLCSGSHQVQRDCQPSALNCFVEAMSQCVPPIPIRPCVLKYLGKTHNLWFRSTLMLEHQAFEKGLSLQIKPKQTTEFYEQESITPPQQEILDSLAELYSLLQEEDMWAGLWQKRCKYSETATAIAYEQHGFFEQAQESYEKAMDKAKKEHERSNASPAIFPEYQLWEDHWIRCSKELNQWEALTEYGQSKGHINPYLVLECAWRVSNWTAMKEALVQVEVSCPKEMAWKVNMYRGYLAICHPEEQQLSFIERLVEMASSLAIREWRRLPHVVSHVHTPLLQAAQQIIELQEAAQINAGLQPTNLGRNNSLHDMKTVVKTWRNRLPIVSDDLSHWSSIFMWRQHHYQAIVTAYENSSQHDPSSNNAMLGVHASASAIIQYGKIARKQGLVNVALDILSRIHTIPTVPIVDCFQKIRQQVKCYLQLAGVMGKNECMQGLEVIESTNLKYFTKEMTAEFYALKGMFLAQINKSEEANKAFSAAVQMHDVLVKAWAMWGDYLENIFVKERQLHLGVSAITCYLHACRHQNESKSRKYLAKVLWLLSFDDDKNTLADAVDKYCIGVPPIQWLAWIPQLLTCLVGSEGKLLLNLISQVGRVYPQAVYFPIRTLYLTLKIEQRERYKSDPGPIRATAPMWRCSRIMHMQRELHPTLLSSLEGIVDQMVWFRENWHEEVLRQLQQGLAKCYSVAFEKSGAVSDAKITPHTLNFVKKLVSTFGVGLENVSNVSTMFSSAASESLARRAQATAQDPVFQKLKGQFTTDFDFSVPGSMKLHNLISKLKKWIKILEAKTKQLPKFFLIEEKCRFLSNFSAQTAEVEIPGEFLMPKPTHYYIKIARFMPRVEIVQKHNTAARRLYIRGHNGKIYPYLVMNDACLTESRREERVLQLLRLLNPCLEKRKETTKRHLFFTVPRVVAVSPQMRLVEDNPSSLSLVEIYKQRCAKKGIEHDNPISRYYDRLATVQARGTQASHQVLRDILKEVQSNMVPRSMLKEWALHTFPNATDYWTFRKMFTIQLALIGFAEFVLHLNRLNPEMLQIAQDTGKLNVAYFRFDINDATGDLDANRPVPFRLTPNISEFLTTIGVSGPLTASMIAVARCFAQPNFKVDGILKTVLRDEIIAWHKKTQEDTSSPLSAAGQPENMDSQQLVSLVQKAVTAIMTRLHNLAQFEGGESKVNTLVAAANSLDNLCRMDPAWHPWL

SEQ ID NO: 1134 - protein, 800 aa, Homo Sapiens
MGSSKKHRGEKEAAGTTAAAGTGGATEQPPRHREHKKHKHRSGGSGGSGGERRKRSRERGGERGSGRRGAEAEARSSTHGRERSQAEPSERRVKREKRDDGYEAAASSKTSSGDASSLSIEETNKLRAKLGLKPLEVNAIKKEAGTKEEPVTADVINPMALRQREELREKLAAAKEKRLLNQKLGKIKTLGEDDPWLDDTAAWIERSRQLQKEKDLAEKRAKLLEEMDQEFGVSTLVEEEFGQRRQDLYSARDLQGLTVEHAIDSFREGETMILTLKDKGVLQEEEDVLVNVNLVDKERAEKNVELRKKKPDYLPYAEDESVDDLAQQKPRSILSKYDEELEGERPHSFRLEQGGTADGLRERELEEIRAKLRLQAQSLSTVGPRLASEYLTPEEMVTFKKTKRRVKKIRKKEKEVVVRADDLLPLGDQTQDGDFGSRLRGRGRRRVSEVEEEKEPVPQPLPSDDTRVENMDISDEEEGGAPPPGSPQVLEEDEAELELQKQLEKGRRLRQLQQLQQLRDSGEKVVEIVKKLESRQRGWEEDEDPERKGAIVFNATSEFCRTLGEIPTYGLAGNREEQEELMDFERDEERSANGGSESDGEENIGWSTVNLDEEKQQQDFSASSTTILDEEPIVNRGLAAALLLCQNKGLLETTVQKVARVKAPNKSLPSAVYCIEDKMAIDDKYSRREEYRGFTQDFKEKDGYKPDVKIEYVDETGRKLTPKEAFRQLSHRFHGKGSGKMKTERRMKKLDEEALLKKMSSSDTPLGTVALLQEKQKAQKTPYIVLSGSGKSMNANTITK

SEQ ID NO: 1135 - protein, 834 aa, Homo Sapiens
MAVEDEGLRVFQSVKIKIGEAKNLPSYPGPSKMRDCYCTVNLDQEEVFRTKIVEKSLCPFYGEDFYCEIPRSFRHLSFYIFDRDVFRRDSIIGKVAIQKEDLQKYHNRDTWFQLQHVDADSEVQGKVHLELRLSEVITDTGVVCHKLATRIVECQGLPIVNGQCDPYATVTLAGPFRSEAKKTKVKRKTNNPQFDEVFYFEVTRPCSYSKKSHFDFEEEDVDKLEIRVDLWNASNLKFGDEFLGELRIPLKVLRQSSSYEAWYFLQPRDNGSKSLKPDDLGSLRLNVVYTEDHVFSSDYYSPLRDLLLKSADVEPVSASAAHILGEVCREKQEAAVPLVRLFLHYGRVVPFISAIASAEVKRTQDPNTIFRGNSLASKCIDETMKLAGMHYLHVTLKPAIEEICQSHKPCEIDPVKLKDGENLENNMENLRQYVDRVFHAITESGVSCPTVMCDIFFSLREAAAKRFQDDPDVRYTAVSSFIFLRFFAPAILSPNLFQLTPHHTDPQTSRTLTLISKTVQTLGSLSKSKSASFKESYMATFYEFFNEQKYADAVKNFLDLISSSGRRDPKSVEQPIVLKEGFMIKRAQGRKRFGMKNFKKRWFRLTNHEFTYHKSKGDQPLYSIPIENILAVEKLEEESFKMKNMFQVIQPERALYIQANNCVEAKDWIDILTKVSQCNQKRLTVYHPSAYLSGHWLCCRAPSDSAPGCSPCTGGLPANIQLDIDGDRETERIYSLFNLYMSKLEKMQEACGSKSVYDGPEQEEYSTFVIDDPQETYKTLKQVIAGVGALEQEHAQYKRDKFKKTKYGSQEHPIGDKSFQNYIRQQSETSTHSI

SEQ ID NO: 1136 - protein, 588 aa, Homo Sapiens
MGGLEKKKYERGSATNYITRNKARKKLQLSLADFRRLCILKGIYPHEPKHKKKVNKGSTAARTFYLIKDIRFLLHEPIVNKFREYKVFVRKLRKAYGKSEWNTVERLKDNKPNYKLDHIIKERYPTFIDALRDLDDALSMCFLFSTFPRTGKCHVQTIQLCRRLTVEFMHYIIAARALRKVFLSIKGIYYQAEVLGQPIVWITPYAFSHDHPTDVDYRVMATFTEFYTTLLGFVNFRLYQLLNLHYPPKLEGQAQAEAKAGEGTYALDSESCMEKLAALSASLARVVVPATEEEAEVDEFPTDGEMSAQEEDRRKELEAQEKHKKLFEGLKFFLNREVPREALAFIIRSFGGEVSWDKSLCIGATYDVTDSRITHQIVDRPGQQTSVIGRCYVQPQWVFDSVNARLLLPVAEYFSGVQLPPHLSPFVTEKEGDYVPPEKLKLLALQRGEDPGNLNESEEEEEEDDNNEGDGDEEGENEEEEEDAEAGSEKEEEARLAALEEQRMEGKKPRVMAGTLKLEDKQRLAQEEESEAKRLAIMMMKKREKYLYQKIMFGKRRKIREANKLAEKRKAHDEAVRSEKKAKKARPE

SEQ ID NO: 1137 - protein, 337 aa, Homo Sapiens
MDQNEHSHWGPHAKGQCASRSELRIILVGKTGTGKSAAGNSILRKQAFESKLGSQTLTKTCSKSQGSWGNREIVIIDTPDMFSWKDHCEALYKEVQRCYLLSAPGPHVLLLVTQLGRYTSQDQQAAQRVKEIFGEDAMGHTIVLFTHKEDLNGGSLMDYMHDSDNKALSKLVAACGGRICAFNNRAEGSNQDDQVKELMDCIEDLLMEKNGDHYTNGLYSLIQRSKCGPVGSDERVKEFKQSLIKYMETQRSYTALAEANCLKGALIKTQLCVLFCIQLFLRLIILWLCILHSMCNLFCCLLFSMCNLFCSLLFIIPKKLMIFLRTVIRLERKTPRL

SEQ ID NO: 1138 - protein, 799 aa, Homo Sapiens
MKPSPAGTAKELEPPAPARGEQRTAEPEGRWREKGEADTERQRTRERQEATLAGLAELEYLRQRQELLVRGALRGAGGAGAAAPRAGELLGEAAQRSRLEEKFLEENILLLRKQLNCLRRRDAGLLNQLQELDKQISDLRLDVEKTSEEHLETDSRPSSGFYELSDGASGSLSNSSNSVFSECLSSCHSSTCFCSPLEATLSLSDGCPKSADVNPKYQCDLVSKNGNDVYRYPSPLHAVAVQSPMFLLCLTGNPLREEDRLGNHASDICGGSELDAVKTDSSLPSPSSLWSASHPSSSKKMDGYILSLVQKKTHPVRTNKPRTSVNADPTKGLLRNGSVCVRAPGGVSQGNSVNLKNSKQACLPSGGIPSLNNGTFSPPKQWSKESKAEQAESKRVPLPEGCPSGAASDLQSKHLPKTAKPASQEHARCSAIGTGESPKESAQLSGASPKESPSRGPAPPQENKVVQPLKKMSQKNSLQGVPPATPPLLSTAFPVEERPALDFKSEGSSQSLEEAHLVKAQFIPGQQPSVRLHRGHRNMGVVKNSSLKHRGPALQGLENGLPTVREKTRAGSKKCRFPDDLDTNKKLKKASSKGRKSGGGPEAGVPGRPAGGGHRAGSRAHGHGREAVVAKPKHKRTDYRRWKSSAEISYEEALRRARRGRRENVGLYPAPVPLPYASPYAYVASDSEYSAECESLFHSTVVDTSEDEQSNYTTNCFGDSESSVSEGEFVGESTTTSDSEESGGLIWSQFVQTLPIQTVTAPDLHNHPAKTFVKIKASHNLKKKILRFRSGSLKLMTTV

SEQ ID NO: 1139 - protein, 83 aa, Homo Sapiens
MGRRKSKRKPPPKKKMTGTLETQFTCPFCNHEKSCDVKMDRARNTGVISCTVCLEEFQTPITYLSEPVDVYSDWIDACEAANQ

SEQ ID NO: 1140 - protein, 340 aa, Homo Sapiens [sequence omitted]

SEQ ID NO: 1141 - protein, 210 aa, Homo Sapiens
MPPYTVVYFPVRGRCAALRMLLADQGQSWKEEVVTVETWQEGSLKASCLYGQLPKFQDGDLTLYQSNTILRHLGRTLGLYGKDQQEAALVDMVNDGVEDLRCKYISLIYTNYEAGKDDYVKALPGQLKPFETLLSQNQGGKTFIVGDQISFADYNLLDLLLIHEVLAPGCLDAFPLLSAYVGRLSARPKLKAFLASPEYVNLPINGNGKQ

SEQ ID NO: 1142 - protein, 433 aa, Homo Sapiens
MATSGDCPRSESQGEEPAECSEAGLLQEGVQPEEFVAIADYAATDETQLSFLRGEKILILRQTTADWWWGERAGCCGYIPANHVGKHVDEYDPEDTWQDEEYFGSYGTLKLHLEMLADQPRTTKYHSVILQNKESLTDKVILDVGCGTGIISLFCAHYARPRAVYAVEASEMAQHTGQLVLQNGFADIITVYQQKVEDVVLPEKVDVLVSEWMGTCLLFEFMIESILYARDAWLKEDGVIWPTMAALHLVPCSADKDYRSKVLFWDNAYEFNLSALKSLAVKEFFSKPKYNHILKPEDCLSEPCTILQLDMRTVQISDLETLRGELRFDIRKAGTLHGFTAWFSVHFQSLQEGQPPQVLSTGPFHPTTHWKQTLFMMDDPVPVHTGDVVTGSVVLQRNPVWRRHMSVALSWAVTSRQDPTSQKVGEKVFPIWR

SEQ ID NO: 1143 - protein, 691 aa, Homo Sapiens
MAAGVEAAAEVAATEIKMEEESGAPGVPSGNGAPGPKGEGERPAQNEKRKEKNIKRGGNRFEPYANPTKRYRAFITNIPFDVKWQSLKDLVKEKVGEVTYVELLMDAEGKSRGCAVVEFKMEESMKKAAEVLNKHSLSGRPLKVKEDPDGEHARRAMQKAGRLGSTVFVANLDYKVGWKKLKEVFSMAGVVVRADILEDKDGKSRGIGTVTFEQSIEAVQAISMFNGQLLFDRPMHVKMDERALPKGDFFPPERPQQLPHGLGGIGMGLGPGGQPIDANHLNKGIGMGNIGPAGMGMEGIGFGINKMGGMEGPFGGGMENMGRFGSGMNMGRINEILSNALKRGEIIAKQGGGGGGGSVPGIERMGPGIDRLGGAGMERMGAGLGHGMDRVGSEIERMGLVMDRMGSVERMGSGIERMGPLGLDHMASSIERMGQTMERIGSGVERMGAGMGFGLERMAAPIDRVGQTIERMGSGVERMGPAIERMGLSMERMVPAGMGAGLERMGPVMDRMATGLERMGANNLERMGLERMGANSLERMGLERMGANSLERMGPAMGPALGAGIERMGLAMGGGGGASFDRAIEMERGNFGGSFAGSFGGAGGHAPGVARKACQIFVRNLPFDFTWKMLKDKFNECGHVLYADIKMENGKSKGCGVVKFESPEVAERACRMMNGMKLSGREIDVRIDRNA

SEQ ID NO: 1144 - protein, 816 aa, Homo Sapiens
MESRVLLRTFCLIFGLGAVWGLGVDPSLQIDVLTELELGESTTGVRQVPGLHNGTKAFLFQDTPRSIKASTATAEQFFQKLRNKHEFTILVTLKQTHLNSGVILSIHHLDHRYLELESSGHRNEVRLHYRSGSHRPHTEVFPYILADDKWHKLSLAISASHLILHIDCNKIYERVVEKPSTDLPLGTTFWLGQRNNAHGYFKGIMQDVQLLVMPQGFIAQCPDLNRTCPTCNDFHGLVQKIMELQDILAKTSAKLSRAEQRMNRLDQCYCERTCTMKGTTYREFESWIDGCKNCTCLNGTIQCETLICPNPDCPLKSALAYVDGKCCKECKSICQFQGRTYFEGERNTVYSSSGVCVLYECKDQTMKLVESSGCPALDCPESHQITLSHSCCKVCKGYDFCSERHNCMENSICRNLNDRAVCSCRDGFRALREDNAYCEDIDECAEGRHYCRENTMCVNTPGSFMCICKTGYIRIDDYSCTEHDECITNQHNCDENALCFNTVGGHNCVCKPGYTGNGTTCKAFCKDGCRNGGACIAANVCACPQGFTGPSCETDIDECSDGFVQCDSRANCINLPGWYHCECRDGYHDNGMFSPSGESCEDIDECGTGRHSCANDTICFNLDGGYDCRCPHGKNCTGDCIHDGKVKHNGQIWVLENDRCSVCSCQNGFVMCRRMVCDCENPTVDLFCCPECDPRLSSQCLHQNGETLYNSGDTWVQNCQQCRCLQGEVDCWPLPCPDVECEFSILPENECCPRCVTDPCQADTIRNDITKTCLDEMNVVRFTGSSWIKHGTECTLCQCKNGHICCSVDPQCLQEL

SEQ ID NO: 1145 - protein, 401 aa, Homo Sapiens
MSSKIIGINGDFFANMVVDAVLAIKYTDIRGQPRYPVNSVNILKAHGRSQMESMLISGYALNCVVGSQGMPKRIVNAKIACLDFSLQKTKMKLGVQVVITDPEKLDQIRQRESDITKERIQKILATGANVILTTGGIDDMCLKYFVEAGAMAVRRVLKRDLKRIAKASGATILSTLANLEGEETFEAAMLGQAEEVVQERICDDELILIKNTKARTSASIILRGANDFMCDEMERSLHDALCVVKRVLESKSVVPGGGAVEAALSIYLENYATSMGSREQLAIAEFARSLLVIPNTLAVNAAQDSTDLVAKLRAFHNEAQVNPERKNLKWIGLDLSNGKPRDNKQAGVFEPTIVKVKSLKFATEAAITILRIDDLIKLHPESKDDKHGSYEDAVHSGALND

SEQ ID NO: 1146 - protein, 344 aa, Homo Sapiens
MGFNLTFHLSYKFRLLLLLTLCLTVVGWATSNYFVGAIQEIPKAKEFMANFHKTLILGKGKTLTNEASTKKVELDNCPSVSPYLRGQSKLIFKPDLTLEEVQAENPKVSRGRYRPQECKALQRVAILVPHRNREKHLMYLLEHLHPFLQRQQLDYGIYVIHQAEGKKFNRAKLLNVGYLEALKEENWDCFIFHDVDLVPENDFNLYKCEEHPKHLVVGRNSTGYRLRYSGYFGGVTALSREQFFKVNGFSNNYWGWGGEDDDLRLRVELQRMKISRPLPEVGKYTMVFHTRDKGNEVNAERMKLLHQVSRVWRTDGLSSCSYKLVSVEHNPLYINITVDFWFGA

SEQ ID NO: 1147 - protein, 271 aa, Homo Sapiens
MAGLEVLFASAAPAITCRQDALVCFLHWEVVTHGYFGLGVGDQPGPNDKKSELLPAGWNNNKDLYVLRYEYKDGSRKLLVKAITVESSMILNVLEYGSQQVADLTLNLDDYIDAEHLGDFHRTYKNSEELRSRIVSGIITPIHEQWEKANVSSPHREFPPATAREVDPLRIPPHHPHTSRQPPWCDPLGPFVVGGEDLDPFGPRRGGMIVDPLRSGFPRALIDPSSGLPNRLPPGAVPPGARFDPFGPIGTSPPGPNPDHLPPPGYDDMYL

SEQ ID NO: 1148 - protein, 1227 aa, Homo Sapiens
MGDTSEDASIHRLEGTDLDCQVGGLICKSKSAASEQHVFKAPAPRPSLLGLDLLASLKRREREEKDDGEDKKKSKVSSYKDWEESKDDQKDAEEEGGDQAGQNIRKDRHYRSARVETPSHPGGVSEEFWERSRQRERERREHGVYASSKEEKDWKKEKSRDRDYDRKRDRDERDRSRHSSRSERDGGSERSSRRNEPESPRHRPKDAATPSRSTWEEEDSGYGSSRRSQWESPSPTPSYRDSERSHRLSTRDRDRSVRGKYSDDTPLPTPSYKYNEWADDRRHLGSTPRLSRGRGRREEGEEGISFDTEEERQQWEDDQRQADRDWYMMDEGYDEFHNPLAYSSEDYVRRREQHLHKQKQKRISAQRRQINEDNERWETNRMLTSGVVHRLEVDEDFEEDNAAKVHLMVHNLVPPFLDGRIVFTKQPEPVIPVKDATSDLAIIARKGSQTVRKHREQKERKKAQHKHWELAGTKLGDIMGVKKEEEPDKAVTEDGKVDYRTEQKFADHMKRKSEASSEFAKKKSILEQRQYLPIFAVQQELLTIIRDNSIVIVVGETGSGKTTQLTQYLHEDGYTDYGMIGCTQPRRVAAMSVAKRVSEEMGGNLGEEVGYAIRFEDCTSENTLIKYMTDGILLRESLREADLDHYSAIIMDEAHERSLNTDVLFGLLREVVARRSDLKLIVTSATMDAEKFAAFFGNVPIFHIPGRTFPVDILFSKTPQEDYVEAAVKQSLQVHLSGAPGDILIFMPGQEDIEVTSDQIVEHLEELENAPALAVLPIYSQLPSDLQAKIFQKAPDGVRKCIVATNIAETSLTVDGIMFVIDSGYCKLKVFNPRIGMDALQIYPISQANANQRSGRAGRTGPGQCFRLYTQSAYKNELLTTTVPEIQRTNLANVVLLLKSLGVQDLLQFHFMDPPPEDNMLNSMYQLWILGALDNTGGLTSTGRLMVEFPLDPALSKMLIVSCDMGCSSEILLIVSMLSVPAIFYRPKGREEESDQIREKFAVPESDHLTYLNVYLQWKNNNYSTIWCNDHFIHAKAMRKVREVRAQLKDIMVQQRMSLASCGTDWDIVRKCICAAYFHQAAKLKGIGEYVNIRTGMPCHLHPTSSLFGMGYTPDYIVYHELVMTTKEYMQCVTAVDGEWLAELGPMFYSVKQAGKSRQENRRRAKEEASAMEEEMALAEEQLRARRQEQEKRSPLGSVRSTKIYTPGRKEQGEPMTPRRTPARFGL

SEQ ID NO: 1149 - protein, 401 aa, Homo Sapiens
MEPGRRGAAALLALLCVACALRAGRAQYERYSFRSFPRDELMPLESAYRHALDKYSGEHWAESVGYLEISLRLHRLLRDSEAFCHRNCSAAPQPEPAAGLASYPELRLFGGLLRRAHCLKRCKQGLPAFRQSQPSREVLADFQRREPYKFLQFAYFKANNLPKAIAAAHTFLLKHPDDEMMKRNMAYYKSLPGAEDYIKDLETKSYESLFIRAVRAYNGENWRTSITDMELALPDFFKAFYECLAACEGSREIKDFKDFYLSIADHYVEVLECKIQCEENLTPVIGGYPVEKFVATMYHYLQFAYYKLNDLKNAAPCAVSYLLFDQNDKVMQQNLVYYQYHRDTWGLSDEHFQPRPEAVQFFNVTTLQKELYDFAKENIMDDDEGEVVEYVDDLLELEETS

SEQ ID NO: 1150 - protein, 941 aa, Homo Sapiens
MNKKKKPFLGMPAPLGYVPGLGRGATGFTTRSDIGPARDANDPVDDRHAPPGKRTVGDQMKKNQAADDDDEDLNDTNYDEFNGYAGSLFSSGPYEKDDEEADAIYAALDKRMDERRKERREQREKEEIEKYRMERPKIQQQFSDLKRKLAEVTEEEWLSIPEVGDARNKRQRNPRYEKLTPVPDSFFAKHLQTGENHTSVDPRQTQFGGLNTPYPGGLNTPYPGGMTPGLMTPGTGELDMRKIGQARNTLMDMRLSQVSDSVSGQTVVDPKGYLTDLNSMIPTHGGDINDIKKARLLLKSVRETNPHHPPAWIASARLEEVTGKLQVARNLIMKGTEMCPKSEDVWLEAARLQPGDTAKAVVAQAVRHLPQSVRIYIRAAELETDIRAKKRVLRKALEHVPNSVRLWKAAVELEEPEDARIMLSRAVECCPTSVELWLALARLETYENARKVLNKARENIPTDRHIWITAAKLEEANGNTQMVEKIIDRAITSLRANGVEINREQWIQDAEECDRAGSVATCQAVMRAVIGIGIEEEDRKHTWMEDADSCVAHNALECARAIYAYALQVFPSKKSVWLRAAYFEKNHGTRESLEALLQRAVAHCPKAEVLWLMGAKSKWLAGDVPAARSILALAFQANPNSEEIWLAAVKLESENDEYERARRLLAKARSSAPTARVFMKSVKLEWVQDNIRAAQDLCEEALRHYEDFPKLWMMKGQIEEQKEMMEKAREAYNQGLKKCPHSTPLWLLLSRLEEKIGQLTRARAILEKSRLKNPKNPGLWLESVRLEYRAGLKNIANTLMAKALQECPNSGILWSEAIFLEARPQRRTKSVDALKKCEHDPHVLLAVAKLFWSQRKITKAREWFHRTVKIDSDLGDAWAFFYKFELQHGTEEQQEEVRKRCESAEPRHGELWCAVSKDIANWQKKIGDILRLVAGRIKNTF

SEQ ID NO: 1151 - protein, 273 aa, Homo Sapiens
MDPVPGTDSAPLAGLAWSSASAPPPRGFSAISCTVEGAPASFGKSFAQKSGYFLCLSSLGSLENPQENVVADIQIVVDKSPLPLGFSPVCDPMDSKASVSKKKRMCVKLLPLGATDTAVFDVRLSGKTKTVPGYLRIGDMGGFAIWCKKAKAPRPVPKPRGLSRDMQGLSLDAASQPSKGGLLERTASRLGSRASTLRRNDSIYEASSLYGISAMDGVPFTLHPRFEGKSCSPLAFSAFGDLTIKSLADIEEEYNYGFVVEKTAAARLPPSVS

SEQ ID NO: 1152 - protein, 224 aa, Homo Sapiens
MSVFGKLFGAGGGKAGKGGPTPQEAIQRLRDTEEMLSKKQEFLEKKIEQELTAAKKHGTKNKRAALQALKRKKRYEKQLAQIDGTLSTIEFQREALENANTNTEVLKNMGYAAKAMKAAHDNMDIDKVDELMQDIADQQELAEEISTAISKPVGFGEEFDEDELMAELEELEQEELDKNLLEISGPETVPLPNVPSIALPSKPAKKKEEEDDDMKELENWAGSM

SEQ ID NO: 1153 - protein, 276 aa, Homo Sapiens
MDADSLLLSLELASGSGQGLSPDRRASLLTSLMLVKRDYRYDRVLFWGRILGLVADYYIAQGLSEDQLAPRKTLYSLNCTEWSLLPPATEEMVAQSSVVKGRFMGDPSYEYEHTELQKVNEGEKVFEEEIVVQIKEETRLVSVIDQIDKAVAIIPRGALFKTPFGPTHVNRTFEGLSLSEAKKLSSYFHFREPVELKNKTLLEKADLDPSLDFMDSLEHDIPKGSWSIQMERGNALVVLRSLLWPGLTFYHAPRTKNYGYVYVGTGEKNMDLPFML

SEQ ID NO: 1154 - protein, 137 aa, Homo Sapiens
MGWLRPGPRPLCPPARASWAFSHRFPSPLAPRRSPTPFFMASLLCCGPKLAACGIVLSAWGVIMLIMLGIFFNVHSAVLIEDVPFTEKDFENGPQNIYNLYEQVSYNCFIAAGLYLLLGGFSFCQVRLNKRKEYMVR

SEQ ID NO: 1155 - protein, 655 aa, Homo Sapiens
MQAARMAASLGRQLLRLGGGSSRLTALLGQPRPGPARRPYAGGAAQLALDKSDSHPSDALTRKKPAKAESKSFAVGMFKGQLTTDQVFPYPSVLNEEQTQFLKELVEPVSRFFEEVNDPAKNDALEMVEETTWQGLKELGAFGLQVPSELGGVGLCNTQYARLVEIVGMHDLGVGITLGAHQSIGFKGILLFGTKAQKEKYLPKLASGETVAAFCLTEPSSGSDAASIRTSAVPSPCGKYYTLNGSKLWISNGGLADIFTVFAKTPVTDPATGAVKEKITAFVVERGFGGITHGPPEKKMGIKASNTAEVFFDGVRVPSENVLGEVGSGFKVAMHILNNGRFGMAAALAGTMRGIIAKAVDHATNRTQFGEKIHNFGLIQEKLARMVMLQYVTESMAYMVSANMDQGATDFQIEAAISKIFGSEAAWKVTDECIQIMGGMGFMKEPGVERVLRDLRIFRIFEGTNDILRLFVALQGCMDKGKELSGLGSALKNPFGNAGLLLGEAGKQLRRRAGLGSGLSLSGLVHPELSRSGELAVRALEQFATVVEAKLIKHKKGIVNEQFLLQRLADGAIDLYAMVVVLSRASRSLSEGHPTAQHEKMLCDTWCIEAAARIREGMAALQSDPWQQELYRNFKSISKALVERGGVVTSNPLGF

SEQ ID NO: 1156 - protein, 605 aa, Homo Sapiens
MKASSRFKAHQDALPRLPVPPLQQSLDHYLKALQPIVSEEEWAHTKQLVDEFQASGGVGERLQKGLERRARKTENWLSEWWLKTAYLQYRQPVVIYSSPGVMLPKQDFVDLQGQLRFAAKLIEGVLDFKVMIDNETLPVEYLGGKPLCMNQYYQILSSCRVPGPKQDTVSNFSKTKKPPTHITVVHNYQFFELDVYHSDGTPLTADQIFVQLEKIWNSSLQTNKEPVGILTSNHRNSWAKAYNTLIKDKVNRDSVRSIQKSIFTVCLDATMPRVSEDVYRSHVAGQMLHGGGSRLNSGNRWFDKTLQFIVAEDGSCGLVYEHAAAEGPPIVTLLDYVIEYTKKPELVRSPMVPLPMPKKLRFNITPEIKSDIEKAKQNLSIMIQDLDITVMVFHHFGKDFPKSEKLSPDAFIQMALQLAYYRIYGQACATYESASLRMFHLGRTDTIRSASMDSLTFVKAMDDSSVTEHQKVELLRKAVQAHRGYTDRAIRGEAFDRHLLGLKLQAIEDLVSMPDIFMDTSYAIAMHFHLSTSQVPAKTDCVMFFGPVVPDGYGVCYNPMEAHINFSLSAYNSCAETNAARLAHYLEKALLDMRALLQSHPRAKL

SEQ ID NO: 1157 - protein, 326 aa, Homo Sapiens
MSNGYEDHMAEDCRGDIGRTNLIVNYLPQNMTQDELRSLFSSIGEVESAKLIRDKVAGHSLGYGFVNYVTAKDAERAINTLNGLRLQSKTIKVSYARPSSEVIKDANLYISGLPRTMTQKDVEDMFSRFGRIINSRVLVDQTTGLSRGVAFIRFDKRSEAEEAITSFNGHKPPGSSEPITVKFAANPNQNKNVALLSQLYHSPARRFGGPVHHQAQRFRFSPMGVDHMSGLSGVNVPGNASSGWCIFIYNLGQDADEGILWQMFGPFGAVTNVKVIRDFNTNKCKGFGFVTMTNYEEAAMAIASLNGYRLGDKILQVSFKTNKSHK

SEQ ID NO: 1158 - protein, 237 aa, Homo Sapiens
MAAVRALVASRLAAASAFTSLSPGGRTPSQRAALHLSVPRPAARVALVLSGCGVYDGTEIHEASAILVHLSRGGAEVQIFAPDVPQMHVIDHTKGQPSEGESRNVLTESARIARGKITDLANLSAANHDAAIFPGGFGAAKNLLCCIAPVLAAKVLRGVEVTVGHEQEEGGKWPYAGTAEAIKALGAKHCVKEVVEAHVDQKNKVVTTPAFMCETALHYIHDGIGAMVRKVLELTGK

SEQ ID NO: 1159 - protein, 624 aa, Homo Sapiens
MQPDPRPSGAGACCRFLPLQSQCPEGAGDAVMYASTECKAEVTPSQHGNRTFSYTLEDHTKQAFGIMNELRLSQQLCDVTLQVKYQDAPAAQFMAHKVVLASSSPVFKAMFTNGLREQGMEVVSIEGIHPKVMERLIEFAYTASISMGEKCVLHVMNGAVMYQIDSVVRACSDFLVQQLDPSNAIGIANFAEQIGCVELHQRAREYIYMHFGEVAKQEEFFNLSHCQLVTLISRDDLNVRCESEVFHACINWVKYDCEQRRFYVQALLRAVRCHSLTPNFLQMQLQKCEILQSDSRCKDYLVKIFEELTLHKPTQVMPCRAPKVGRLIYTAGGYFRQSLSYLEAYNPSDGTWLRLADLQVPRSGLAGCVVGGLLYAVGGRNNSPDGNTDSSALDCYNPMTNQWSPCAPMSVPRNRIGVGVIDGHIYAVGGSHGCIHHNSVERYEPERDEWHLVAPMLTRRIGVGVAVLNRLLYAVGGFDGTNRLNSAECYYPERNEWRMITAMNTIRSGAGVCVLHNCIYAAGGYDGQDQLNSVERYDVETETWTFVAPMKHRRSALGITVHQGRIYVLGGYDGHTFLDSVECYDPDTDTWSEVTRMTSGRSGVGVAVTMEPCRKQIDQQNCTC

SEQ ID NO: 1160 - protein, 1698 aa, Homo Sapiens
MVGELRYREFRVPLGPGLHAYPDELIRQRVGHDGHPEYQIRWLILRRGDEGDGGSGQVDCKAEHILLWMSKDEIYANCHKMLGEDGQVIGPSQESAGEVGALDKSVLEEMETDVKSLIQRALRQLEECVGTIPPAPLLHTVHVLSAYASIEPLTGVFKDPRVLDLLMHMLSSPDYQIRWSAGRMIQALSSHDAGTRTQILLSLSQQEAIEKHLDFDSRCALLALFAQATLSEHPMSFEGIQLPQVPGRVLFSLVKRYLHVTSLLDQLNDSAAEPGAQNTSAPEELSGERGQLELEFSMAMGTLISELVQAMRWDQASDRPRSSARSPGSIFQPQLADVSPGLPAAQAQPSFRRSRRFRPRSEFASGNTYALYVRDTLQPGMRVRMLDDYEEISAGDEGEFRQSNNGVPPVQVFWESTGRTYWVHWHMLEILGFEEDIEDMVEADEYQGAVASRVLGRALPAWRWRPMTELYAVPYVLPEDEDTEECEHLTLAEWWELLFFIKKLDGPDHQEVLQILQENLDGEILDDEILAELAVPIELAQDLLLTLPQRLNDSALRDLINCHVYKKYGPEALAGNQAYPSLLEAQEDVLLLDAQAQAKDSEDAAKVEAKEPPSQSPNTPLQRLVEGYGPAGKILLDLEQALSSEGTQENKVKPLLLQLQRQPQPFLALMQSLDTPETNRTLHLTVLRILKQLVDFPEALLLPWHEAVDACMACLRSPNTDREVLQELIFFLHRLTSVSRDYAVVLNQLGARDAISKALEKHLGKLELAQELRDMVFKCEKHAHLYRKLITNILGGCIQMVLGQIEDHRRTHQPINIPFFDVFLRYLCQGSSVEVKEDKCWEKVEVSSNPHRASKLTDHNPKTYWESNGSAGSHYITLHMRRGILIRQLTLLVASEDSSYMPARVVVCGGDSTSSLHTELNSVNVMPSASRVILLENLTRFWPIIQIRIKRCQQGGIDTRIRGLEILGPKPTFWPVFREQLCRHTRLFYMVRAQAWSQDMAEDRRSLLHLSSRLNGALRQEQNFADRFLPDDEAAQALGKTCWEALVSPVVQNITSPDEDGISPLGWLLDQYLECQEAVFNPQSRGPAFFSRVRRLTHLLVHVEPCEAPPPVVATPRPKGRNRSHDWSSLATRGLPSSIMRNLTRCWRAVVEKQVNNFLTSSWRDDDFVPRYCEHFNILQNSSSELFGPRAAFLLALQNGCAGALLKLPFLKAAHVSEQFARHIDQQIQGSRIGGAQEMERLAQLQQCLQAVLIFSGLEIATTFEHYYQHYMADRLLGVVSSWLEGAVLEQIGPCFPNRLPQQMLQSLSTSKELQRQFHVYQLQQLDQELLKLEDTEKKIQVGLGASGKEHKSEKEEEAGAAAVVDVAEGEEEEEENEDLYYEGAMPEVSVLVLSRHSWPVASICHTLNPRTCLPSYLRGTLNRYSNFYNKSQSHPALERGSQRRLQWTWLGWAELQFGNQTLHVSTVQMWLLLYLNDLKAVSVESLLAFSGLSADMLNQAIGPLTSSRGPLDLHEQKDIPGGVLKIRDGSKEPRSRWDIVRLIPPQTYLQAEGEDGQNLEKRRNLLNCLIVRILKAHGDEGLHIDQLVCLVLEAWQKGPCPPRGLVSSLGKGSACSSTDVLSCILHLLGKGTLRRHDDRPQVLSYAVPVTVMEPHTESLNPGSSGPNPPLTFHTLQIRSRGVPYASCTATQSFSTFR

SEQ ID NO: 1161 - protein, 898 aa, Homo Sapiens
MFSQQQQQQLQQQQQQLQQLQQQQLQQQQLQQQQLLQLQQLLQQSPPQAPLPMAVSRGLPPQQPQQPLLNLQGTNSASLLNGSMLQRALLLQQLQGLDQFAMPPATYDTAGLTMPTATLGNLRGYGMASPGLAAPSLTPPQLATPNLQQFFPQATRQSLLGPPPVGVPMNPSQFNLSGRNPQKQARTSSSTTPNRKDSSSQTMPVEDKSDPPEGSEEAAEPRMDTPEDQDLPPCPEDIAKEKRTPAPEPEPCEASELPAKRLRSSEEPTEKEPPGQLQVKAQPQARMTVPKQTQTPDLLPEALEAQVLPRFQPRVLQVQAQVQSQTQPRIPSTDTQVQPKLQKQAQTQTSPEHLVLQQKQVQPQLQQEAEPQKQVQPQVQPQAHSQGPRQVQLQQEAEPLKQVQPQVQPQAHSQPPRQVQLQLQKQVQTQTYPQVHTQAQPSVQPQEHPPAQVSVQPPEQTHEQPHTQPQVSLLAPEQTPVVVHVCGLEMPPDAVEAGGGMEKTLPEPVGTQVSMEEIQNESACGLDVGECENRAREMPGVWGAGGSLKVTILQSSDSRAFSTVPLTPVPRPSDSVSSTPAATSTPSKQALQFFCYICKASCSSQQEFQDHMSEPQHQQRLGEIQHMSQACLLSLLPVPRDVLETEDEEPPPRRWCNTCQLYYMGDLIQHRRTQDHKIAKQSLRPFCTVCNRYFKTPRKFVEHVKSQGHKDKAKELKSLEKEIAGQDEDHFITVDAVGCFEGDEEEEEDDEDEEEIEVEEELCKQVRSRDISREEWKGSETYSPNTAYGVDFLVPVMGYICRICHKFYHSNSGAQLSHCKSLGHFENLQKYKAAKNPSPTTRPVSRRCAINARNALTALFTSSGRPPSQPNTQDKTPSKVTARPSQPPLPRRSTRLKT

SEQ ID NO: 1162 - protein, 301 aa, Homo Sapiens
MTRHGKNCTAGAVYTYHEKKKDTAASGYGTQNIRLSRDAVKDFDCCCLSLQPCHDPVVTPDGYLYEREAILEYILHQKKEIARQMKAYEKQRGTRREEQKELQRAASQDHVRGFLEKESAIVSRPLNPFTAKALSGTSPDDVQPGPSVGPPSKDKDKVLPSFWIPSLTPEAKATKLEKPSRTVTCPMSGKPLRMSDLTPVHFTPLDSSVDRVGLITRSERYVCAVTRDSLSNATPCAVLRPSGAVVTLECVEKLIRKDMVDPVTGDKLTDRDIIVLQRGGTGFAGSGVKLQAEKSRPVMQA

SEQ ID NO: 1163 - protein, 588 aa, Homo Sapiens
MSSGLRAADFPRWKRHISEQLRRRDRLQRQAFEEIILQYNKLLEKSDLHSVLAQKLQAEKHDVPNRHEISPGHDGTWNDNQLQEMAQLRIKHQEELTELHKKRGELAQLVIDLNNQMQRKDREMQMNEAKIAECLQTISDLETECLDLRTKLCDLERANQTLKDEYDALQITFTALEGKLRKTTEENQELVTRWMAEKAQEANRLNAENEKDSRRRQARLQKELAEAAKEPLPVEQDDDIEVIVDETSDHTEETSPVRAISRAATRRSVSSFPVPQDNVDTHPGSGKEVRVPATALCVFDAHDGEVNAVQFSPGSRLLATGGMDRRVKLWEVFGEKCEFKGSLSGSNAGITSIEFDSAGSYLLAASNDFASRIWTVDDYRLRHTLTGHSGKVLSAKFLLDNARIVSGSHDRTLKLWDLRSKVCIKTVFAGSSCNDIVCTEQCVMSGHFDKKIRFWDIRSESIVREMELLGKITALDLNPERTELLSCSRDDLLKVIDLRTNAIKQTFSAPGFKCGSDWTRVVFSPDGSYVAAGSAEGSLYIWSVLTGKVEKVLSKQHSSSINAVAWSPSGSHVVSVDKGCKAVLWAQY

SEQ ID NO: 1164 - protein, 200 aa, Homo Sapiens
MDDKKKKRSPKPCLAQPAQAPGTLRRVPVPTSHSGSLALGLPHLPSPKQRAKFKRVGKEKCRPVLAGGGSGSAGTPLQHSFLTEVTDVYEMEGGLLNLLNDFHSGRLQAFGKECSFEQLEHVREMQEKLARLHFSLDVCGEEEDDEEEEDGVTEGLPEEQKKTMADRNLDQLLSNLEDLSNSIQKLHLAENAEPEEQSAA

SEQ ID NO: 1165 - protein, 120 aa, Homo Sapiens
PPEWEPRWRKALRGKENKGSVEIMRKDLNDARDLHGQAESAAAVWKGHVMDRRKKALTDYKKLRAFFVEEEEHFLQEAEKEEGLPEDELADPTERFRSLLQAVSELEKKHRNLGLSMLLQ

SEQ ID NO: 1166 - protein, 141 aa, Homo Sapiens
MLHSMRFLRTDSASADPGNLKYSSSRDRGGSSSYGLQPSNSAVVSRQRHDDTRVHADIQNDEKGGYSVNGGSGENTYGRKSLGQELRVNNVTSPEFTSVQHGSRALATKDMRKSQERSMSYCDESRLSNLLRRITREDDRD

SEQ ID NO: 1167 - protein, 276 aa, Homo Sapiens
MGNSMKSTPAPAERPLPNPEGLDSDFLAVLSDYPSPDISPPIFRRGEKLRVISDEGGWWKAISLSTGRESYIPGICVARVYHGWLFEGLGRDKAEELLQLPDTKVGSFMIRESETKKGFYSLSVRHRQVKHYRIFRLPNNWYYISPRLTFQCLEDLVNHYSEVADGLCCVLTTPCLTQSTAAPAVRASSSPVTLRQKTVDWRRVSRLQEDPEGTENPLGVDESLFSYGLRESIASYLSLTSEDNTSFDRKKKSISLMYGGSKRKSSFFSSPPYFED

SEQ ID NO: 1168 - protein, 200 aa, Homo Sapiens
MAQQRALPQSKETLLQSYNKRLKDDIKSIMDNFTEIIKTAKIEDETQVSRATQGEQDNYEMHVRAANIVRAGESLMKLVSDLKQFLILNDFPSVNEAIDQRNQQLRTLQEECDRKLITLRDEISIDLYELEEEYYSSSSSLCEANDLPLCEAYGRLDLDTDSADGLSAPLLASPEPSAGPLQVAAPAHSHAGGPGPTEHA

SEQ ID NO: 1169 - protein, 147 aa, Homo Sapiens
MASHRLLLLCLAGLVFVSEAGPTGTGESKCPLMVKVLDAVRGSPAINVAVHVFRKAADDTWEPFASGKTSESGELHGLTTEEEFVEGIYKVEIDTKSYWKALGISPFHEHAEVVFTANDSGPRRYTIAALLSPYSYSTTAVVTNPKE

SEQ ID NO: 1170 - protein, 461 aa, Homo Sapiens
MAEVGEIIEGCRLPVLRRNQDNEDEWPLAEILSVKDISGRKLFYVHYIDFNKRLDEWVTHERLDLKKIQFPKKEAKTPTKNGLPGSRPGSPEREVKRKVEVVSPATPVPSETAPASVFPQNGAARRAVAAQPGRKRKSNCLGTDEDSQDSSDGIPSAPRMTGSLVSDRSHDDIVTRMKNIECIELGRHRLKPWYFSPYPQELTTLPVLYLCEFCLKYGRSLKCLQRHLTKCDLRHPPGNEIYRKGTISFFEIDGRKNKSYSQNLCLLAKCFLDHKTLYYDTDPFLFYVMTEYDCKGFHIVGYFSKEKESTEDYNVACILTLPPYQRRGYGKLLIEFSYELSKVEGKTGTPEKPLSDLGLLSYRSYWSQTILEILMGLKSESGERPQITINEISEITSIKKEDVISTLQYLNLINYYKGQYILTLSEDIVDGHERAMLKRLLRIDSKCLHFTPKDWSKRGKW

SEQ ID NO: 1171 - protein, 339 aa, Homo Sapiens
MMDSQLVAGVAFKKTFSYAGFEMQPKKYHNPKIALLNVELELKAEKDNAEIRVHTVEDYQAIVDAEWNILYDKLEKIHHSGAKVVLSKLPIGDVATQYFADRDMFCAGRVPEEDLKRTMMACGGSIQTSVNALSADVLGRCQVFEETQIGGERYNFFTGCPKAKTCTFILRGGAEQFMEETERSLHDAIMIVRRAIKNDSVVAGGGAIEMELSKYLRDYSRTIPGKQQLLIGAYAKALEIIPRQLCDNAGFDATNILNKLRARHAQGGTWYGVDINNEDIADNFEAFVWEPAMVRINALTAASEAACLIVSVDETIKNPRSTVDAPTAAGRGRGRGRPH

SEQ ID NO: 1172 - protein, 236 aa, Homo Sapiens
MFCTLNTHKVDMDKLLGGQIGLEDFIFAHVKGQRKEVEVFKSEDALGLTITDNGAGYAFIKRIKEGSVIDHIHLISVGDMIEAINGQSLLGCRHYEVARLLKELPRGRTFTLKLTEPRKAFDMISQRSAGGRPGSGPQLGTGRGTLRLRSRGPATVEDLPSAFEEKAIEKVDDLLESYMGIRDTELAATMVELGKDKRNPDELAEALDERLGDFAFPDEFVFDVWGAIGDAKVGRY

SEQ ID NO: 1173 - protein, 652 aa, Homo Sapiens
MGGWKGPGQRRGKEGPEARRRAAERGGGGGGGGVPAPRSPAREPRPRSCLLLPPPWGAAMTPDLLNFKKGWMSILDEPGEPPSPSLTTTSTSQWKKHWFVLTDSSLKYYRDSTAEEADELDGEIDLRSCTDVTEYAVQRNYGFQIHTKDAVYTLSAMTSGIRRNWIEALRKTVRPTSAPDVTKLSDSNKENALHSYSTQKGPLKAGEQRAGSEVISRGGPRKADGQRQALDYVELSPLTQASPQRARTPARTPDRLAKQEELERDLAQRSEERRKWFEATDSRTPEVPAGEGPRRGLGAPLTEDQQNRLSEEIEKKWQELEKLPLRENKRVPLTALLNQSRGERRGPPSDGHEALEKEVQALRAQLEAWRLQGEAPQSALRSQEDGHIPPGYISQEACERSLAEMESSHQQVMEELQRHHERELQRLQQEKEWLLAEETAATASAIEAMKKAYQEELSRELSKTRSLQQGPDGLRKQHQSDVEALKRELQVLSEQYSQKCLEIGALMRQAEEREHTLRRCQQEGQELLRHNQELHGRLSEEIDQLRGFIASQGMGNGCGRSNERSSCELEVLLRVKENELQYLKKEVQCLRDELQMMQKDKRFTSGKYQDVYVELSHIKTRSEREIEQLKEHLRLAMAALQEKESMRNSLAE

SEQ ID NO: 1174 - protein, 1504 aa, Homo Sapiens
MATARTFGPEREAEPAKEARVVGSELVDTYTVYIIQVTDGSHEWTVKHRYSDFHDLHEKLVAERKIDKNLLPPKKIIGKNSRSLVEKREKDLEVYLQKLLAAFPGVTPRVLAHFLHFHFYEINGITAALAEELFEKGEQLLGAGEVFAIGPLQLYAVTEQLQQGKPTCASGDAKTDLGHILDFTCRLKYLKVSGTEGPFGTSNIQEQLLPFDLSIFKSLHQVEISHCDAKHIRGLVASKPTLATLSVRFSATSMKEVLVPEASEFDEWEPEGTTLEGPVTAVIPTWQALTTLDLSHNSISEIDESVKLIPKIEFLDLSHNGLLVVDNLQHLYNLVHLDLSYNKLSSLEGLHTKLGNIKTLNLAGNLLESLSGLHKLYSLVNLDLRDNRIEQMEEVRSIGSLPCLEHVSLLNNPLSIIPDYRTKVLAQFGERASEVCLDDTVTTEKELDTVEVLKAIQKAKEVKSKLSNPEKKGGEDSRLSAAPCIRPSSSPPTVAPASASLPQPILSNQGIMFVQEEALASSLSSTDSLTPEHQPIAQGCSDSLESIPAGQAASDDLRDVPGAVGGASPEHAEPEVQVVPGSGQIIFLPFTCIGYTATNQDFIQRLSTLIRQAIERQLPAWIEAANQREEGQGEQGEEEDEEEEEEEDVAENRYFEMGPPDVEEEEGGGQGEEEEEEEEDEEAEEERLALEWALGADEDFLLEHIRILKVLWCFLIHVQGSIRQFAACLVLTDFGIAVFEIPHQESRGSSQHILSSLRFVFCFPHGDLTEFGFLMPELCLVLKVRHSENTLFIISDAANLHEFHADLRSCFAPQHMAMLCSPILYGSHTSLQEFLRQLLTFYKVAGGCQERSQGCFPVYLVYSDKRMVQTAAGDYSGNIEWASCTLCSAVRRSCCAPSEAVKSAAIPYWLLLTPQHLNVIKADFNPMPNRGTHNCRNRNSFKLSRVPLSTVLLDPTRSCTQPRGAFADGHVLELLVGYRFVTAIFVLPHEKFHFLRVYNQLRASLQDLKTVVIAKTPGTGGSPQGSFADGQPAERRASNDQRPQEVPAEALAPAPAEVPAPAPAAASASGPAKTPAPAEASTSALVPEETPVEAPAPPPAEAPAQYPSEHLIQATSEENQIPSHLPACPSLRHVASLRGSAIIELFHSSIAEVENEELRHLMWSSVVFYQTPGLEVTACVLLSTKAVYFVLHDGLRRYFSEPLQDFWHQKNTDYNNSPFHISQCFVLKLSDLQSVNVGLFDQHFRLTGSTPMQVVTCLTRDSYLTHCFLQHLMVVLSSLERTPSPEPVDKDFYSEFGNKTTGKMENYELIHSSRVKFTYPSEEEIGDLTFTVAQKMAEPEKAPALSILLYVQAFQVGMPPPGCCRGPLRPKTLLLTSSEIFLLDEDCVHYPLPEFAKEPPQRDRYRLDDGRRVRDLDRVLMGYQTYPQALTLVFDDVQGHDLMGSVTLDHFGEVPGGPARASQGREVQWQVFVPSAESREKLISLLARQWEALCGRELPVELTG

SEQ ID NO: 1175 - protein, 275 aa, Homo Sapiens
MASFPPRVNEKEIGKLLLNLVDHTEVVRDLTFAPDGSLILVSASRDKTLRVWDLKDDGNMMKVLRGHQNWVYSCAFSPDSSMLCSVGASKAVFLWNMDKYTMIRKLEGHHHDVVACDFSPDGALLATASYDTRVYIWDPHNGDILMEFGHLFPPPTPIFAGGANDRWVRSVSFSHDGLHVASLADDKMVRFWRIDEDYPVQVAPLSNGLCCAFSTDGSVLAAGTHDGSVYFWATPRQVPSLQHLCRMSIRRVMPTQEVQELPIPSKLLEFLSYRI

SEQ ID NO: 1176 - protein, 533 aa, Homo Sapiens
MAFANLRKVLISDSLDPCCRKILQDGGLQVVEKQNLSKEELIAELQDCEGLIVRSATKVTADVINAAEKLQVVGRAGTGVDNVDLEAATRKGILVMNTPNGNSLSAAELTCGMIMCLARQIPQATASMKDGKWERKKFMGTELNGKTLGILGLGRIGREVATRMQSFGMKTIGYDPIISPEVSASFGVQQLPLEEIWPLCDFITVHTPLLPSTTGLLNDNTFAQCKKGVRVVNCARGGIVDEGALLRALQSGQCAGAALDVFTEEPPRDRALVDHENVISCPHLGASTKEAQSRCGEEIAVQFVDMVKGKSLTGVVNAQALTSAFSPHTKPWIGLAEALGTLMRAWAGSPKGTIQVITQGTSLKNAGNCLSPAVIVGLLKEASKQADVNLVNAKLLVKEAGLNVTTSHSPAAPGEQGFGECLLAVALAGAPYQAVGLVQGTTPVLQGLNGAVFRPEVPLRRDLPLLLFRTQTSDPAMLPTMIGLLAEAGVRLLSYQTSLVSDGETWHVMGISSLLPSLEAWKQHVTEAFQFHF

SEQ ID NO: 1177 - protein, 504 aa, Homo Sapiens
MSLICSISNEVPEHPCVSPVSNHVYERRLIEKYIAENGTDPINNQPLSEEQLIDIKVAHPIRPKPPSATSIPAILKALQDEWDAVMLHSFTLRQQLQTTRQELSHALYQHDAACRVIARLTKEVTAAREALATLKPQAGLIVPQAVPSSQPSVVGAGEPMDLGELVGMTPEIIQKLQDKATVLTTERKKRGKTVPEELVKPEELSKYRQVASHVGLHSASIPGILALDLCPSDTNKILTGGADKNVVVFDKSSEQILATLKGHTKKVTSVVFHPSQDLVFSASPDATIRIWSVPNASCVQVVRAHESAVTGLSLHATGDYLLSSSDDQYWAFSDIQTGRVLTKVTDETSGCSLTCAQFHPDGLIFGTGTMDSQIKIWDLKERTNVANFPGHSGPITSIAFSENGYYLATAADDSSVKLWDLRKLKNFKTLQLDNNFEVKSLIFDQSGTYLALGGTDVQIYICKQWTEILHFTEHSGLTTGVAFGHHAKFIASTGMDRSLKFYSL

SEQ ID NO: 1178 - protein, 194 aa, Homo Sapiens
MKIWTSEHVFDHPWETVTTAAMQKYPNPMNPSVVGVDVLDRHIDPSGKLHSHRLLSTEWGLPSIVKSLIGAARTKTYVQEHSVVDPVEKTMELKSTNISFTNMVSVDERLIYKPHPQDPEKTVLTQEAIITVKGVSLSSYLEGLMASTISSNASKGREAMEWVIHKLNAEIEELTASARGTIRTPMAAAAFAEK

SEQ ID NO: 1179 - protein, 179 aa, Homo Sapiens
MAATEPILAATGSPAAVPPEKLEGAGSSSAPERNCVGSSLPEASPPAPEPSSPNAAVPEAIPTPRAAASAALELPLGPAPVSVAPQAEAEARSTPGPAGSRLGPETFRQRFRQFRYQDAAGPREAFRQLRELSRQWLRPDIRTKEQIVEMLVQEQLLAILPEAARARRIRRRTDVRITG

SEQ ID NO: 1180 - protein, 334 aa, Homo Sapiens
MATRQRESSITSCCSTSSCDADDEGVRGTCEDASLCKRFAVSIGYWHDPYIQHFVRLSKERKAPEINRGYFARVHGVSQLIKAFLRKTECHCQIVNLGAGMDTTFWRLKDEDLLPSKYFEVDFPMIVTRKLHSIKCKPPLSSPILELHSEDTLQMDGHILDSKRYAVIGADLRDLSELEEKLKKCNMNTQLPTLLIAECVLVYMTPEQSANLLKWAANSFERAMFINYEQVNMGDRFGQIMIENLRRRQCDLAGVETCKSLESQKERLLSNGWETASAVDMMELYNRLPRAEVSRIESLEFLDEMELLEQLMRHYCLCWATKGGNELGLKEITY

SEQ ID NO: 1181 - protein, 826 aa, Homo Sapiens
MVAPVLETSHVFCCPNRVRGVLNWSSGPRGLLAFGTSCSVVLYDPLKRVVVTNLNGHTARVNCIQWICKQDGSPSTELVSGGSDNQVIHWEIEDNQLLKAVHLQGHEGPVYAVHAVYQRRTSDPALCTLIVSAAADSAVRLWSKKGPEVMCLQTLNFGNGFALALCLSFLPNTDVPILACGNDDCRIHIFAQQNDQFQKVLSLCGHEDWIRGVEWAAFGRDLFLASCSQDCLIRIWKLYIKSTSLETQDDDNIRLKENTFTIENESVKIAFAVTLETVLAGHENWVNAVHWQPVFYKDGVLQQPVRLLSASMDKTMILWAPDEESGVWLEQVRVGEVGGNTLGFYDCQFNEDGSMIIAHAFHGALHLWKQNTVNPREWTPEIVISGHFDGVQDLVWDPEGEFIITVGTDQTTRLFAPWKRKDQSQVTWHEIARPQIHGYDLKCLAMINRFQFVSGADEKVLRVFSAPRNFVENFCAITGQSLNHVLCNQDSDLPEGATVPALGLSNKAVFQGDIASQPSDEEELLTSTGFEYQQVAFQPSILTEPPTEDHLLQNTLWPEVQKLYGHGYEIFCVTCNSSKTLLASACKAAKKEHAAIILWNTTSWKQVQNLVFHSLTVTQMAFSPNEKFLLAVSRDRTWSLWKKQDTISPEFEPVFSLFAFTNKITSVHSRIIWSCDWSPDSKYFFTGSRDKKVVVWGECDSTDDCIEHNIGPCSSVLDVGGAVTAVSVCPVLHPSQRYVVAVGLECGKICLYTWKKTDQVPEINDWTHCVETSQSQSHTLAIRKLCWKNCSGKTEQKEAEGAEWLHFASCGEDHTVKIHRVNKCAL

SEQ ID NO: 1182 - protein, 308 aa, Homo Sapiens
MNPIVVVHGGGAGPISKDRKERVHQGMVRAATVGYGILREGGSAVDAVEGAVVALEDDPEFNAGCGSVLNTNGEVEMDASIMDGKDLSAGAVSAVQCIANPIKLARLVMEKTPHCFLTDQGAAQFAAAMGVPEIPGEKLVTERNKKRLEKEKHEKGAQKTDCQKNLGTVGAVALDCKGNVAYATSTGGIVNKMVGRVGDSPCLGAGGYADNDIGAVSTTGHGESILKVNLARLTLFHIEQGKTVEEAADLSLGYMKSRVKGLGGLIVVSKTGDWVAKWTSTSMPWAAAKDGKLHFGIDPDDTTITDLP

SEQ ID NO: 1183 - protein, 175 aa, Homo Sapiens
MPKSCAARQCCNRYSSRRKQLTFHRFPFSRPELLKEWVLNIGRGNFKPKQHTVICSEHFRPECFSAFGNRKNLKHNAVPTVFAFQDPTQQVRENTDPASERGNASSSQKEKTSPCRSQVLPEAGAGEDSPGRNMDTALEELQLPPNAEGHVKQAMLFNVENGTPASREALWLSEE

SEQ ID NO: 1184 - protein, 292 aa, Homo Sapiens
MELLCCEGTRHAPRAGPDPRLLGDQRVLQSLLRLEERYVPRASYFQCVQREIKPHMRKMLAYWMLEVCEEQRCEEEVFPLAMNYLDRYLSCVPTRKAQLQLLGAVCMLLASKLRETTPLTIEKLCIYTDHAVSPRQLRDWEVLVLGKLKWDLAAVIAHDFLAFILHRLSLPRDRQALVKKHAQTFLALCATDYTFAMYPPSMIATGSIGAAVQGLGACSMSGDELTELLAGITGTEVDCLRACQEQIEAALRESLREASQTSSSPAPKAPRGSSSQGPSQTSTPTDVTAIHL

SEQ ID NO: 1185 - protein, 238 aa, Homo Sapiens
MAAAPLLLLLLLVPVPLLPLLAQGPGGALGNRHAVYWNSSNQHLRREGYTVQVNVNDYLDIYCPHYNSSGVGPGAGPGPGGGAEQYVLYMVSRNGYRTCNASQGFKRWECNRPHAPHSPIKFSEKFQRYSAFSLGYEFHAGHEYYYISTPTHNLHWKCLRMKVFVCCASTSHSGEKPVPTLPQFTMGPNVKINVLEDFEGENPQVPKLEKSISGTSPKREHLPLAVGIAFFLMTFLAS

SEQ ID NO: 1186 - protein, 349 aa, Homo Sapiens
MEAHNASAPFNFTLPPNFGKRPTDLALSVILVFMLFFIMLSLGCTMEFSKIKAHLWKPKGLAIALVAQYGIMPLTAFVLGKVFRLKNIEALAILVCGCSPGGNLSNVFSLAMKGDMNLSIVMTTCSTFCALGMMPLLLYIYSRGIYDGDLKDKVPYKGIVISLVLVLIPCTIGIVLKSKRPQYMRYVIKGGMIIILLCSVAVTVLSAINVGKSIMFAMTPLLIATSSLMPFIGFLLGYVLSALFCLNGRCRRTVSMETGCQNVQLCSTILNVAFPPEVIGPLFFFPLLYMIFQLGEGLLLIAIFWCYEKFKTPKDKTKMIYTAATTEETIPGALGNGTYKGEDCSPCTA

SEQ ID NO: 1187 - protein, 1208 aa, Homo Sapiens
MERLRDVRERLQAWERAFRRQRGRRPSQDDVEAAPEETRALYREYRTLKRTTGQAGGGLRSSESLPAAAEEAPEPRCWGPHLNRAATKSPQPTPGRSRQGSVPDYGQRLKANLKGTLQAGPALGRRPWPLGRASSKASTPKPPGTGPVPSFAEKVSDEPPQLPEPQPRPGRLQHLQASLSQRLGSLDPGWLQRCHSEVPDFLGAPKACRPDLGSEESQLLIPGESAVLGPGAGSQGPEASAFQEVSIRVGSPQPSSSGGEKRRWNEEPWESPAQVQQESSQAGPPSEGAGAVAVEEDPPGEPVQAQPPQPCSSPSNPRYHGLSPSSQARAGKAEGTAPLHIFPRLARHDRGNYVRLNMKQKHYVRGRALRSRLLRKQAWKQKWRKKGECFGGGGATVTTKESCFLNEQFDHWAAQCPRPASEEDTDAVGPEPLVPSPQPVPEVPSLDPTVLPLYSLGPSGQLAETPAEVFQALEQLGHQAFRPGQERAVMRILSGISTLLVLPTGAGKSLCYQLPALLYSRRSPCLTLVVSPLLSLMDDQVSGLPPCLKAACIHSGMTRKQRESVLQKIRAAQVHVLMLTPEALVGAGGLPPAAQLPPVAFACIDEAHCLSQWSHNFRPCYLRVCKVLRERMGVHCFLGLTATATRRTASDVAQHLAVAEEPDLHGPAPVPTNLHLSVSMDRDTDQALLTLLQGKRFQNLDSIIIYCNRREDTERIAALLRTCLHAAWVPGSGGRAPKTTAEAYHAGMCSRERRRVQRAFMQGQLRVVVATVAFGMGLDRPDVRAVLHLGLPPSFESYVQAVGRAGRDGQPAHCHLFLQPQGEDLRELRRHVHADSTDFLAVKRLVQRVFPACTCTCTRPPSEQEGAVGGERPVPKYPPQEAEQLSHQAAPGPRRVCMGHERALPIQLTVQALDMPEEAIETLLCYLELHPHHWLELLATTYTHCRLNCPGGPAQLQALAHRCPPLAVCLAQQLPEDPGQGSSSVEFDMVKLVDSMGWELASVRRALCQLQWDHEPRTGVRRGTGVLVEFSELAFHLRSPGDLTAEEKDQICDFLYGRVQARERQALARLRRTFQAFHSVAFPSCGPCLEQQDEERSTRLKDLLGRYFEEEEGQEPGGMEDAQGPEPGQARLQDWEDQVRCDIRQFLSLRPEEKFSSRAVARIFHGIGSPCYPAQVYGQDRRFWRKYLHLSFHALVGLATEELLQVAR

SEQ ID NO: 1188 - protein, 308 aa, Homo Sapiens [sequence omitted]

SEQ ID NO: 1189 - protein, 500 aa, Homo Sapiens
MAAASVSAASGSHLSNSFAEPSRSNGSMVRHSSSPYVVYPSDKPFLNSDLRRSPSKPTLAYPESNSRAIFSALKNLQDKIRRLELERIQAEESVKTLSRETIEYKKVLDEQIQERENSKNEESKHNQELTSQLLAAENKCNLLEKQLEYMRNMIKHAEMERTSVLEKQVSLERERQHDQTHVQSQLEKLDLLEQEYNKLTTMQALAEKKMQELEAKLHEEEQERKRMQAKAAELQTGLETNRLIFEDKATPCVPNARRIKKKKSKPPEKKSSRNYFGAQPHYRLCLGDMPFVAGKSTSPSHAVVANVQLVLHLMKQHSKALCNDRVINSIPLAKQVSSRGGKSKKLSVTPPSSNGINEELSEVLQTLQDEFGQMSFDHQQLAKLIQESPTVELKDKLECELEALVGRMEAKANQITKVRKYQAQLEKQKLEKQKKELKATKKTLDEERNSSSRSGITGTTNKKDFMKLRPGEKRRKNLQLLKDMQSIQNSLQSSSLCWDY

SEQ ID NO: 1190 - protein, 364 aa, Homo Sapiens
MNRTAMRASQKDFENSMNQVKLLKKDPGNEVKLKLYALYKQATEGPCNMPKPGVFDLINKAKWDAWNALGSLPKEAARQNYVDLVSSLSPSLESSSQVEPGTDRKSTGFETLVVTSEDGITKIMFNRPKKKNAINTEMYHEIMRALKAASKDDSIITVLTGNGDYYSSGNDLTNFTDIPPGGVEEKAKNNAVLLREFVGCFIDFPKPLIAVVNGPAVGISVTLLGLFDAVYASDRATFHTPFSHLGQSPEGCSSYTFPKIMSPAKATEMLIFGKKLTAGEACAQGLVTEVFPDSTFQKEVWTRLKAFAKLPPNALRISKEVIRKREREKLHAVNAEECNVLQGRWLSDECTNAVVNFLSRKSKL

SEQ ID NO: 1191 - protein, 530 aa, Homo Sapiens
MSMPDAMPLPGVGEELKQAKEIEDAEKYSFMATVTKAPKKQIQFADDMQEFTKFPTKTGRRSLSRSISQSSTDSYSSAASYTDSSDDEVSPREKQQTNSKGSSNFCVKNIKQAEFGRREIEIAEQDMSALISLRKRAQGEKPLAGAKIVGCTHITAQTAVLIETLCALGAQCRWSACNIYSTQNEVAAALAEAGVAVFAWKGESEDDFWWCIDRCVNMDGWQANMILDDGGDLTHWVYKKYPNVFKKIRGIVEESVTGVHRLYQLSKAGKLCVPAMNVNDSVTKQKFDNLYCCRESILDGLKRTTDVMFGGKQVVVCGYGEVGKGCCAALKALGAIVYITEIDPICALQACMDGFRVVKLNEVIRQVDVVITCTGNKNVVTREHLDRMKNSCIVCNMGHSNTEIDVTSLRTPELTWERVRSQVDHVIWPDGKRVVLLAEGRLLNLSCSTVPTFVLSITATTQALALIELYNAPEGRYKQDVYLLPKKMDEYVASLHLPSFDAHLTELTDDQAKYLGLNKNGPFKPNYYRY

SEQ ID NO: 1192 - protein, 575 aa, Homo Sapiens
MGITLHLLLHSDRDPIPDVPAVYFVMPTEENIDRMCQDLRNQLYESYYLNFISAISRSKLEDIANAALAASAVTQVAKVFDQYLNFITLEDDMFVLCNQNKELVSYRAINRPDITDTEMETVMDTIVDSLFCFFVTLGAVPIIRCSRGTAAEMVAVKLDKKLRENLRDARNSLFTGDTLGAGQFSFQRPLLVLVDRNIDLATPLHHTWTYQALVHDVLDFHLNRVNLEESSGVENSPAGARPKRKNKKSYDLTPVDKFWQKHKGSPFPEVAESVQQELESYRAQEDEVKRLKSIMGLEGEDEGAISMLSDNTAKLTSAVSSLPELLEKKRLIDLHTNVATAVLEHIKARKLDVYFEYEEKIMSKTTLDKSLLDIISDPDAGTPEDKMRLFLIYYISTQQAPSEADLEQYKKALTDAGCNLNPLQYIKQWKAFTKMASAPASYGSTTTKPMGLLSRVMNTGSQFVMEGVKNLVLKQQNLPVTRILDNLMEMKSNPETDDYRYFDPKMLRGNDSSVPRNKNPFQEAIVFVVGGGNYIEYQNLVDYIKGKQGKHILYGCSELFNATQFIKQLSQLGQK

SEQ ID NO: 1193 - protein, 345 aa, Homo Sapiens
MLAARLVCLRTLPSRVFHPAFTKASPVVKNSITKNQWLLTPSREYATKTRIGIRRGRTGQELKEAALEPSMEKIFKIDQMGRWFVAGGAAVGLGALCYYGLGLSNEIGAIEKAVIWPQYVKDRIHSTYMYLAGSIGLTALSAIAISRTPVLMNFMMRGSWVTIGVTFAAMVGAGMLVRSIPYDQSPGPKHLAWLLHSGVMGAVVAPLTILGGPLLIRAAWYTAGIVGGLSTVAMCAPSEKFLNMGAPLGVGLGLVFVSSLGSMFLPPTTVAGATLYSVAMYGGLVLFSMFLLYDTQKVIKRAEVSPMYGVQKYDPINSMLSIYMDTLNIFMRVATMLATGGNRKK

SEQ ID NO: 1194 - protein, 399 aa, Homo Sapiens
MSQVTFSDVAIDFSHEEWACLDSAQRDLYKDVMVQNYENLVSVGLSVTKPYVIMLLEDGKEPWMMEKKLSKDWESRWENKELSTKKDIYDEDSPQPVTMEKVVKQSYEFSNSNKNLEYTECDTFRSTFHSKSTLSEPQNNSAEGNSHKYDILKKNLSKKSVIKSERINGGKKLLNSNKSGAAFNQSKSLTLPQTCNREKIYTCSECGKAFGKQSILSRHWRIHTGEKPYECRECGKTFSHGSSLTRHQISHSGEKPYKCIECGKAFSHGSSLTNHQSTHTGEKPYECMNCGKSFSRVSLLIQHLRIHTQEKRYECRICGKAFIHSSSLIHHQKSHTGEKPYECRECGKAFCCSSHLTQHQRIHSMKKKYECNKCLKVFSSFSFLVQHQSIHTEEKPFEV

SEQ ID NO: 1195 - protein, 168 aa, Homo Sapiens
MLFRLSEHSSPEEEASPHQRASGEGHHLKSKRPNPCAYTPPSLKAVQRIAESHLQSISNLNENQASEEEDELGELRELGYPREEDEEEEEDDEEEEEEEDSQAEVLKVIRQSAGQKTTCGQGLEGPWERPPPLDESERDGGSEDQVEDPALSEPGEEPQRPSPSEPGT

SEQ ID NO: 1196 - protein, 437 aa, Homo Sapiens
MALAGAPAGGPCAPALEALLGAGALRLLDSSQIVIISAAQDASAPPAPTGPAAPAAGPCDPDLLLFATPQAPRPTPSAPRPALGRPPVKRRLDLETDHQYLAESSGPARGRGRHPGKGVKSPGEKSRYETSLNLTTKRFLELLSHSADGVVDLNWAAEVLKVQKRRIYDITNVLEGIQLIAKKSKNHIQWLGSHTTVGVGGRLEGLTQDLRQLQESEQQLDHLMNICTTQLRLLSEDTDSQRLAYVTCQDLRSIADPAEQMVMVIKAPPETQLQAVDSSENFQISLKSKQGPIDVFLCPEETVGGISPGKTPSQEVTSEEENRATDSATIVSPPPSSPPSSLTTDPSQSLLSLEQEPLLSRMGSLRAPVDEDRLSPLVAADSLLEHVREDFSGLLPEEFISLSPPHEALDYHFGLEEGEGIRDLFDCDFGDLTPLDF

SEQ ID NO: 1197 - protein, 169 aa, Homo Sapiens
MNTLQGPVSFKDVAVDFTQEEWRQLDPDEKIAYGDVMLENYSHLVSVGYDYHQAKHHHGVEVKEVEQGEEPWIMEGEFPCQHSPEPAKAIKPIDRKSVHQICSGPVVLSLSTAVKELVENSLDAGATNIDLKLKDYGVDLIEVSDNGCGVEEENFEGLTMSPFLPATRR

SEQ ID NO: 1198 - protein, 367 aa, Homo Sapiens
MSSPPPARSGFYRQEVTKTAWEVRAVYRDLQPVGSGAYGAVCSAVDGRTGAKVAIKKLYRPFQSELFAKRAYRELRLLKHMRHENVIGLLDVFTPDETLDDFTDFYLVMPFMGTDLGKLMKHEKLGEDRIQFLVYQMLKGLRYIHAAGIIHRDLKPGNLAVNEDCELKILDFGLARQADSEMTGYVVTRWYRAPEVILNWMRYTQTVDIWSVGCIMAEMITGKTLFKGSDHLDQLKEIMKVTGTPPAEFVQRLQSDEAKNYMKGLPELEKKDFASILTNASPLAVNLLEKMLVLDAEQRVTAGEALAHPYFESLHDTEDEPQVQKYDDSFDDVDRTLDEWKRVTYKEVLSFKPPRQLGARVSKETPL

SEQ ID NO: 1199 - protein, 680 aa, Homo Sapiens
MESSSSSNSYFSVGPTSPSAVVLLYSKELKKWDEFEDILEERRHVSDLKFAMKCYTPLVYKGITPCKPIDIKCSVLNSEEIHYVIKQLSKESLQSVDVLREEVSEILDEMSHKLRLGAIRFCAFTLSKVFKQIFSKVCVNEEGIQKLQRAIQEHPVVLLPSHRSYIDFLMLSFLLYNYDLPVPVIAAGMDFLGMKMVGELLRMSGAFFMRRTFGGNKLYWAVFSEYVKTMLRNGYAPVEFFLEGTRSRSAKTLTPKFGLLNIVMEPFFKREVFDTYLVPISISYDKILEETLYVYELLGVPKPKESTTGLLKARKILSENFGSIHVYFGDPVSLRSLAAGRMSRSSYNLVPRYIPQKQSEDMHAFVTEVAYKMELLQIENMVLSPWTLIVAVLLQNRPSMDFDALVEKTLWLKGLTQAFGGFLIWPDNKPAEEVVPASILLHSNIASLVKDQVILKVDSGDSEVVDGLMLQHITLLMCSAYRNQLLNIFVRPSLVAVALQMTPGFRKEDVYSCFRFLRDVFADEFIFLPGNTLKDFEEGCYLLCKSEAIQVTTKDILVTEKGNTVLEFLVGLFKPFVESYQIICKYLLSEEEDHFSEEQYLAAVRKFTSQLLDQGTSQCYDVLSSDVQKNALAACVRLGVVEKKKINNNCIFNVNEPATTKLEEMLGCKTPIGKPATAKL

SEQ ID NO: 1200 - protein, 639 aa, Homo Sapiens
MEPAMEPETLEARINRATNPLNKELDWASINGFCEQLNEDFEGPPLATRLLAHKIQSPQEWEAIQALTVLETCMKSCGKRFHDEVGKFRFLNELIKVVSPKYLGSRTSEKVKNKILELLYSWTVGLPEEVKIAEAYQMLKKQGIVKSDPKLPDDTTFPLPPPRPKNVIFEDEEKSKMLARLLKSSHPEDLRAANKLIKEMVQEDQKRMEKISKRVNAIEEVNNNVKLLTEMVMSHSQGGAAAGSSEDLMKELYQRCERMRPTLFRLASDTEDNDEALAEILQANDNLTQVINLYKQLVRGEEVNGDATAGSIPGSTSALLDLSGLDLPPAGTTYPAMPTRPGEQASPEQPSASVSLLDDELMSLGLSDPTPPSGPSLDGTGWNSFQSSDATEPPAPALAQAPSMESRPPAQTSLPASSGLDDLDLLGKTLLQQSLPPESQQVRWEKQQPTPRLTLRDLQNKSSSCSSPSSSATSLLHTVSPEPPRPPQQPVPTELSLASITVPLESIKPSNILPVTVYDQHGFRILFHFARDPLPGRSDVLVVVVSMLSTAPQPIRNIVFQSAVPKVMKVKLQPPSGTELPAFNPIVHPSAITQVLLLANPQKEKVRLRYKLTFTMGDQTYNEMGDVDQFPPPETWGSL

SEQ ID NO: 1201 - protein, 643 aa, Homo Sapiens
MAEGELKDMEQFFDDLSDSFSGTEPEVHKTSVVGLFLRHMILAYSKLSFSQVFKLYTALQQYFQNGEKKTVEDADMELTSRDEGERKMEKEELDVSVREEEVSCSGPLSQKQAEFFLSQQASLLKNDETKALTPASLQKELNNLLKFNPDFAEAHYLSYLNNLRVQDVFSSTHSLLHYFDRLILTGAESKSNGEEGYGRSLRYAALNLAALHCRFGHYQQAELALQEAIRIAQESNDHVCLQHCLSWLYVLGQKRSDSYVLLEHSVKKAVHFGLPRAFAGKTANKLMDALKDSDLLHWKHSLSELIDISIAQKTAIWRLYGRSTMALQQAQMLLSMNSLEAVNAGVQQNNTESFAVALCHLAELHAEQGCFAAASEVLKHLKERFPPNSQHAQLWMLCDQKIQFDRAMNDGKYHLADSLVTGITALNSIEGVYRKAVVLQAQNQMSEAHKLLQKLLVHCQKLKNTEMVISVLLSVAELYWRSSSPTIALPMLLQALALSKEYRLQYLASETVLNLAFAQLILGIPEQALSLLHMAIEPILADGAILDKGRAMFLVAKCQVASAASYDQPKKAEALEAAIENLNEAKNYFAKVDCKERIRDVVYFQARLYHTLGKTQERNRCAMLFRQLHQELPSHGVPLINHL

SEQ ID NO: 1202 - protein, 289 aa, Homo Sapiens
MPVVRKIFRRRRGDSESEEDEQDSEEVRLKLEETREVQNLRKRPNGVSAVALLVGEKVQEETTLVDDPFQMKTGGMVDMKKLKERGKDKISEEEDLHLGTSFSAETNRRDEDADMMKYIETELKKRKGIVEHEEQKVKPKNAEDCLYELPENIRVSSAKKTEEMLSNQMLSGIPEVDLGIDAKIKNIISTEDAKARLLAEQQNKKKDSETSFVPTNMAVNYVQHNRFYHEELNAPIRRNKEEPKARPLRVGDTEKPEPERSPPNRKRPANEKATDDYHYEKFKKMNRRY

SEQ ID NO: 1203 - protein, 327 aa, Homo Sapiens
MEVAVPVKQEAEGLALDSPWHRFRRFHLGDAPGPREALGLLRALCRDWLRPEVHTKEQMLELLVLEQFLSALPADTQAWVCSRQPQSGEEAVALLEELWGPAASPDGSSATRVPQDVTQGPGATGGKEDSGMIPLAGTAPGAEGPAPGDSQAVRPYKQEPSSPPLAPGLPAFLAAPGTTSCPECGKTSLKPAHLLRHRQSHSGEKPHACPECGKAFRRKEHLRRHRDTHPGSPGSPGPALRPLPAREKPHACCECGKTFYWREHLVRHRKTHSGARPFACWECGKGFGRREHVLRHQRIHGRAAASAQGAVAPGPDGGGPFPPWPLG

SEQ ID NO: 1204 - protein, 125 aa, Homo Sapiens
MESKEKRAVNSLSMENANQENEEKEQVANKGEPLALPLDAGEYCVPRGNRRRFRVRQPILQYRWDMMHRLGEPQARMREENMERIGEEVRQLMEKLREKQLSHSLRAVSTDPPHHDHHDEFCLMP

SEQ ID NO: 1205 - protein, 1292 aa, Homo Sapiens
MADPAAPTPAAPAPAQAPAPAPEAVPAPAAAPVPAPAPASDSASGPSSDSGPEAGSQRLLFSHDLVSGRYRGSVHFGLVRLIHGEDSDSEGEEEGRGSSGCSEAGGAGHEEGRASPLRRGYVRVQWYPEGVKQHVKETKLKLEDRSVVPRDVVRHMRSTDSQCGTVIDVNIDCAVKLIGTNCIIYPVNSKDLQHIWPFMYGDYIAYDCWLGKVYDLKNQIILKLSNGARCSMNTEDGAKLYDVCPHVSDSGLFFDDSYGFYPGQVLIGPAKIFSSVQWLSGVKPVLSTKSKFRVVVEEVQVVELKVTWITKSFCPGGTDSVSPPPSVITQENLGRVKRLGCFDHAQRQLGERCLYVFPAKVEPAKIAWECPEKNCAQGEGSMAKKVKRLLKKQVVRIMSCSPDTQCSRDHSMEDPDKKGESKTKSEAESASPEETPDGSASPVEMQDEGAEEPHEAGEQLPPFLLKEGRDDRLHSAEQDADDEAADDTDDTSSVTSSASSTTSSQSGSGTSRKKSIPLSIKNLKRKHKRKKNKITRDFKPGDRVAVEVVTTMTSADVMWQDGSVECNIRSNDLFPVHHLDNNEFCPGDFVVDKRVQSCPDPAVYGVVQSGDHIGRTCMVKWFKLRPSGDDVELIGEEEDVSVYDIADHPDFRFRTTDIVIRIGNTEDGAPHKEDEPSVGQVARVDVSSKVEVVWADNSKTIILPQHLYNIESEIEESDYDSVEGSTSGASSDEWEDDSDSWETDNGLVEDEHPKIEEPPIPPLEQPVAPEDKGVVISEEAATAAVQGAVAMAAPMAGLMEKAGKDGPPKSFRELKEAIKILESLKNMTVEQLLTGSPTSPTVEPEKPTREKKFLDDIKKLQENLKKTLDNVAIVEEEKMEAVPDVERKEDKPEGQSPVKAEWPSETPVLCQQCGGKPGVTFTSAKGEVFSVLEFAPSNHSFKKIEFQPPEAKKFFSTVRKEMALLATSLPEGIMVKTFEDRMDLFSALIKGPTRTPYEDGLYLFDIQLPNIYPAVPPHFCYLSQCSGRLNPNLYDNGKVCVSLLGTWIGKGTERWTSKSSLLQVLISIQGLILVNEPYYNEAGFDSDRGLQEGYENSRCYNEMALIRVVQSMTQLVRRPPEVFEQEIRQHFSTGGWRLVNRIESWLETHALLEKAQALPNGVPKASSSPEPPAVAELSDSGQQEPEDGGPAPGEASQGSDSEGGAQGLASASRDHTDQTSETAPDASVPPSVKPKKRRKSYRSFLPEKSGYPDIGFPLFPLSKGFIKSIRGVLTQFRAALLEAGMPECTEDK

SEQ ID NO: 1206 - protein, 264 aa, Homo Sapiens
MAGEQKPSSNLLEQFILLAKGTSGSALTALISQVLEAPGVYVFGELLELANVQELAEGANAAYLQLLNLFAYGTYPDYIANKESLPELSTAQQNKLKHLTIVSLASRMKCIPYSVLLKDLEMRNLRELEDLIIEAVYTDIIQGKLDQRNQLLEVDFCIGRDIRKKDINNIVKTLHEWCDGCEAVLLGIEQQVLRANQYKENHNRTQQQVEAEVTNIKKTLKATASSSAQEMEQQLAERECPPHAEQRQPTKKMSKVKGLVSSRH

SEQ ID NO: 1207 - protein, 400 aa, Homo Sapiens
MAANYSSTSTRREHVKVKTSSQPGFLERLSETSGGMFVGLMAFLLSFYLIFTNEGRALKTATSLAEGLSLVVSPDSIHSVAPENEGRLVHIIGALRTSKLLSDPNYGVHLPAVKLRRHVEMYQWVETEESREYTEDGQVKKETRYSYNTEWRSEIINSKNFDREIGHKNPSAMAVESFMATAPFVQIGRFFLSSGLIDKVDNFKSLSLSKLEDPHVDIIRRGDFFYHSENPKYPEVGDLRVSFSYAGLSGDDPDLGPAHVVTVIARQRGDQLVPFSTKSGDTLLLLHHGDFSAEEVFHRELRSNSMKTWGLRAAGWMAMFMGLNLMTRILYTLVDWFPVFRDLVNIGLKAFAFCVATSLTLLTVAAGWLFYRPLWALLIAGLALVPILVARTRVPAKKLE

SEQ ID NO: 1208 - protein, 270 aa, Homo Sapiens
MGNTSSERAALERHGGHKTPRRDSSGGTKDGDRPKILMDSPEDADLFHSEEIKAPEKEEFLAWQHDLEVNDKAPAQARPTVFRWTGGGKEVYLSGSFNNWSKLPLTRSHNNFVAILDLPEGEHQYKFFVDGQWTHDPSEPIVTSQLGTVNNIIQVKKTDFEVFDALMVDSQKCSDVSELSSSPPGPYHQEPYVCKPEERFRAPPILPPHLLQVILNKDTGISCDPALLPEPNHVMLNHLYALSIKDGVMVLSATHRYKKKYVTTLLYKPI

SEQ ID NO: 1209 - protein, 333 aa, Homo Sapiens
MSGDEMIFDPTMSKKKKKKKKPFMLDEEGDTQTEETQPSETKEVEPEPTEDKDLEADEEDTRKKDASDDLDDLNFFNQKKKKKKTKKIFDIDEAEEGVKDLKIESDVQEPTEPEDDLDIMLGNKKKKKKNVKFPDEDEILEKDEALEDEDNKKDDGISFSNQTGPAWAGSERDYTYEELLNRVFNIMREKNPDMVAGEKRKFVMKPPQVVRVGTKKTSFVNFTDICKLLHRQPKHLLAFLLAELGTSGSIDGNNQLVIKGRFQQKQIENVLRRYIKEYVTCHTCRSPDTILQKDTRLYFLQCETCHSRCSVASIKTGFQAVTGKRAQLRAKAN

SEQ ID NO: 1210 - protein, 306 aa, Homo Sapiens
MDTPPLSDSESESDESLVTDRELQDAFSRGLLKPGLNVVLEGPKKAVNDVNGLKQCLAEFKRDLEWVERLDVTLGPVPEIGGSEAPAPQNKDQKAVDPEDDFQREMSFYRQAQAAVLAVLPRLHQLKVPTKRPTDYFAEMAKSDLQMQKIRQKLQTKQAAMERSEKAKQLRALRKYGKKVQTEVLQKRQQEKAHMMNAIKKYQKGFSDKLDFLEGDQKPLAQRKKAGAKGQQMRKGPSAKRRYKNQKFGFGGKKKGSKWNTRESYDDVSSFRAKTAHGRGLKRPGKKGSNKRPGKRTREKMKNRTH

SEQ ID NO: 1211 - protein, 349 aa, Homo Sapiens
MAHQTGIHATEELKEFFAKARAGSVRLIKVVIEDEQLVLGASQEPVGRWDQDYDRAVLPLLDAQQPCYLLYRLDSQNAQGFEWLFLAWSPDNSPVRLKMLYAATRATVKKEFGGGHIKDELFGTVKDDLSFAGYQKHLSSCAAPAPLTSAERELQQIRINEVKTEISVESKHQTLQGLAFPLQPEAQRALQQLKQKMVNYIQMKLDLERETIELVHTEPTDVAQLPSRVPRDAARYHFFLYKHTHEGDPLESVVFIYSMPGYKCSIKERMLYSSCKSRLLDSVEQDFHLEIAKKIEIGDGAELTAEFLYDEVHPKQHAFKQAFAKPKGPGGKRGHKRLIRGPGENGDDS

SEQ ID NO: 1212 - protein, 570 aa, Homo Sapiens
MAGGAREVLTLQLGHFAGFVGAHWWNQQDAALGRATDSKEPPGELCPDVLYRTGRTLHGQETYTPRLILMDLKGSLSSLKEEGGLYRDKQLDAAIAWQGKLTTHKEELYPKNPYLQDFLSAEGVLSSDGVWRVKSIPNGKGSSPLPTATTPKPLIPTEASIRVWSDFLRVHLHPRSICMIQKYNHDGEAGRLEAFGQGESVLKEPKYQEELEDRLHFYVEECDYLQGFQILCDLHDGFSGVGAKAAELLQDEYSGRGIITWGLLPGPYHRGEAQRNIYRLLNTAFGLVHLTAHSSLVCPLSLGGSLGLRPEPPVSFPYLHYDATLPFHCSAILATALDTVTVPYRLCSSPVSMVHLADMLSFCGKKVVTAGAIIPFPLAPGQSLPDSLMQFGGATPWTPLSACGEPSGTRCFAQSVVLRGIDRACHTSQLTPGTPPPSALHACTTGEEILAQYLQQQQPGVMSSSHLLLTPCRVAPPYPHLFSSCSPPGMVLDGSPKGAAVESIPVFGALCSSSSLHQTLEALARDLTKLDLRRWASFMDAGVEHDDVAELLQELQSLAQCYQGGDSLVD

SEQ ID NO: 1213 - protein, 445 aa, Homo Sapiens
MLPWTALGLALSLRLALARSGAERGPPASAPRGDLMFLLDSSASVSHYEFSRVREFVGQLVAPLPLGTGALRASLVHVGSRPYTEFPFGQHSSGEAAQDAVRASAQRMGDTHTGLALVYAKEQLFAEASGARPGVPKVLVWVTDGGSSDPVGPPMQELKDLGVTVFIVSTGRGNFLELSAAASAPAEKHLHFVDVDDLHIIVQELRGSILDAMRPQQLHATEITSSGFRLAWPPLLTADSGYYVLELVPSAQPGAARRQQLPGNATDWIWAGLDPDTDYDVALVPESNVRLLRPQILRVRTRPGEAGPGASGPESGAGPAPTQLAALPAPEEAGPERIVISHARPRSLRVSWAPALGSAAALGYHVQFGPLRGGEAQRVEVPAGRNCTTLQGLAPGTAYLVTVTAAFRSGRESALSAKACTPDGPRPRPRPVPRAPTPGTASREP

SEQ ID NO: 1214 - protein, 537 aa, Homo Sapiens
MLARETYEEDREYESQAKRLKTEEGEIDYSAEEGENRREATPRGGGDGGGGGRSFSQPEAGGSHHKVSVSPVVHVRGLCESVVEADLVEALEKFGTICYVMMMPFKRQALVEFENIDSAKECVTFAADEPVYIAGQQAFFNYSTSKRITRPGNTDDPSGGNKVLLLSIQNPLYPITVDVLYTVCNPVGKVQRIVIFKRNGIQAMVEFESVLCAQKAKAALNGADIYAGCCTLKIEYARPTRLNVIRNDNDSWDYTKPYLGRRDRGKGRQRQAILGEHPSSFRHDGYGSHGPLLPLPSRYRMGSRDTPELVAYPLPQASSSYMHGGNPSGSVVMVSGLHQLKMNCSRVFNLFCLYGNIEKVKFMKTIPGTALVEMGDEYAVERAVTHLNNVKLFGKRLNVCVSKQHSVVPSQIFELEDGTSSYKDFAMSKNNRFTSAGQASKNIIQPPSCVLHYYNVPLCVTEETFTKLCNDHEVLTFIKYKVFDAKPSAKTLSGLLEWECKTDAVEALTALNHYQIRVPNGSNPYTLKLCFSTSSHL

SEQ ID NO: 1215 - protein, 455 aa, Homo Sapiens
MGACLGACSLLSCASCLCGSAPCILCSCCPASRNSTVSRLIFTFFLFLGVLVSIIMLSPGVESQLYKLPWVCEEGAGIPTVLQGHIDCGSLLGYRAVYRMCFATAAFFFFFTLLMLCVSSSRDPRAAIQNGFWFFKFLILVGLTVGAFYIPDGSFTNIWFYFGVVGSFLFILIQLVLLIDFAHSWNQRWLGKAEECDSRAWYAGLFFFTLLFYLLSIAAVALMFMYYTEPSGCHEGKVFISLNLTFCVCVSIAAVLPKVQDAQPNSGLLQASVITLYTMFVTWSALSSIPEQKCNPHLPTQLGNETVVAGPEGYETQWWDAPSIVGLIIFLLCTLFISLRSSDHRQVNSLMQTEECPPMLDATQQQQQVAACEGRAFDNEQDGVTYSYSFFHFCLVLASLHVMMTLTNWYKPGETRKMISTWTAVWVKICASWAGLLLYLWTLVAPLLLRNRDFS

SEQ ID NO: 1216 - protein, 298 aa, Homo Sapiens
MGDHAWSFLKDFLAGGVAAAVSKTAVAPIERVKLLLQVQHASKQISAEKQYKGIIDCVVRIPKEQGFLSFWRGNLANVIRYFPTQALNFAFKDKYKQLFLGGVDRHKQFWRYFAGNLASGGAAGATSLCFVYPLDFARTRLAADVGKGAAQREFHGLGDCIIKIFKSDGLRGLYQGFNVSVQGIIIYRAAYFGVYDTAKGMLPDPKNVHIFVSWMIAQSVTAVAGLVSYPFDTVRRRMMMQSGRKGADIMYTGTVDCWRKIAKDEGAKAFFKGAWSNVLRGMGGAFVLVLYDEIKKYV

SEQ ID NO: 1217 - protein, 297 aa, Homo Sapiens
MDPGKDKEGVPQPSGPPARKKFVIPLDEDEVPPGVAKPLFRSTQSLPTVDTSAQAAPQTYAEYAISQPLEGAGATCPTGSEPLAGETPNQALKPGAKSNSIIVSPRQRGNPVLKFVRNVPWEFGDVIPDYVLGQSTCALFLSLRYHNLHPDYIHGRLQSLGKNFALRVLLVQVDVKDPQQALKELAKMCILADCTLILAWSPEEAGRYLETYKAYEQKPADLLMEKLEQDFVSRVTECLTTVKSVNKTDSQTLLTTFGSLEQLIAASREDLALCPGLGPQKARRLFDVLHEPFLKVP

SEQ ID NO: 1218 - protein, 136 aa, Homo Sapiens
MARTKQTARKSTGGKAPRKQLATKAARKSAPSTGGVKKPHRYRPGTVALREIRRYQKSTELLIRKLPFQRLVREIAQDFKTDLRFQSAAIGALQEASEAYLVGLFEDTNLCAIHAKRVTIMPKDIQLARRIRGERA

SEQ ID NO: 1219 - protein, 216 aa, Homo Sapiens
MAAQGEPQVQFKLVLVGDGGTGKTTFVKRHLTGEFEKKYVATLGVEVHPLVFHTNRGPIKFNVWDTAGQEKFGGLRDGYYIQAQCAIIMFDVTSRVTYKNVPNWHRDLVRVCENIPIVLCGNKVDIKDRKVKAKSIVFHRKKNLQYYDISAKSNYNFEKPFLWLARKLIGDPNLEFVAMPALAPPEVVMDPALAAQYEHDLEVAQTTALPDEDDDL

SEQ ID NO: 1220 - protein, 852 aa, Homo Sapiens
MEYERRGGRGDRTGRYGATDRSQDDGGENRSRDHDYRDMDYRSYPREYGSQEGKHDYDDSSEEQSAEIRGQLQSHGVQAREVRLMRNKSSGQSRGFAFVEFSHLQDATRWMEANQHSLNILGQKVSMHYSDPKPKINEDWLCNKCGVQNFKRREKCFKCGVPKSEAEQKLPLGTRLDQQTLPLGGRELSQGLLPLPQPYQAQGVLASQALSQGSEPSSENANDTIILRNLNPHSTMDSILGALAPYAVLSSSNVRVIKDKQTQLNRGFAFIQLSTIEAAQLLQILQALHPPLTIDGKTINVEFAKGSKRDMASNEGSRISAASVASTAIAAAQWAISQASQGGEGTWATSEEPPVDYSYYQQDEGYGNSQGTESSLYAHGYLKGTKGPGITGTKGDPTGAGPEASLEPGADSVSMQAFSRAQPGAAPGIYQQSAEASSSQGTAANSQSYTIMSPAVLKSELQSPTHPSSALPPATSPTAQESYSQYPVPDVSTYQYDETSGYYYDPQTGLYYDPNSQYYYNAQSQQYLYWDGERRTYVPALEQSADGHKETGAPSKEGKEKKEKHKTKTAQQIAKDMERWARSLNKQKENFKNSFQPISSLRDDERRESATADAGYAILEKKGALAERQHTSMDLPKLASDDRPSPPRGLVAAYSGESDSEEEQERGGPEREEKLTDWQKLACLLCRRQFPSKEALIRHQQLSGLHKQNLEIHRRAHLSENELEALEKNDMEQMKYRDRAAERREKYGIPEPPEPKRRKYGGISTASVDFEQPTRDGLGSDNIGSRMLQAMGWKEGSGLGRKKQGIVTPIEAQTRVRGSGLGARGSSYGVTSTESYKETLHKTMVTRFNEAQ

SEQ ID NO: 1221 - protein, 3267 aa, Homo Sapiens
MQKARGTRGEDAGTRAPPSPGVPPKRAKVGAGGGAPVAVAGAPVFLRPLKNAAVCAGSDVRLRVVVSGTPQPSLRWFRDGQLLPAPAPEPSCLWLRRCGAQDAGVYSCMAQNERGRASCEAVLTVLEVGDSETAEDDISDVQGTQRLELRDDGAFSTPTGGSDTLVGTSLDTPPTSVTGTSEEQVSWWGSGQTVLEQEAGSGGGTRRLPGSPRQAQATGAGPRHLGVEPLVRASRANLVGASWGSEDSLSVASDLYGSAFSLYRGRALSIHVSVPQSGLRREEPDLQPQLASEAPRRPAQPPPSKSALLPPPSPRVGKRSPPGPPAQPAATPTSPHRRTQEPVLPEDTTTEEKRGKKSKSSGPSLAGTAESRPQTPLSEASGRLSALGRSPRLVRAGSRILDKLQFFEERRRSLERSDSPPAPLRPWVPLRKARSLEQPKSERGAPWGTPGASQEELRAPGSVAERRRLFQQKAASLDERTRQRSPASDLELRFAQELGRIRRSTSREELVRSHESLRATLQRAPSPREPGEPPLFSRPSTPKTSRAVSPAAAQPPSPSSAEKPGDEPGRPRSRGPAGRTEPGEGPQQEVRRRDQFPLTRSRAIQECRSPVPPPAADPPEARTKAPPGRKREPPAQAVRFLPWATPGLEGAAVPQTLEKNRAGPEAEKRLRRGPEEDGPWGPWDRRGARSQGKGRRARPTSPELESSDDSYVSAGEEPLEAPVFEIPLQNVVVAPGADVLLKCIITANPPPQVSWHKDGSALRSEGRLLLRAEGERHTLLLREARAADAGSYMATATNELGQATCAASLTVRPGGSTSPFSSPITSDEEYLSPPEEFPEPGETWPRTPTMKPSPSQNRRSSDTGSKAPPTFKVSLMDQSVREGQDVIMSIRVQGEPKPVVSWLRNRQPVRPDQRRFAEEAEGGLCRLRILAAERGDAGFYTCKAVNEYGARQCEARLEVRAHPESRSLAVLAPLQDVDVGAGEMALFECLVAGPTDVEVDWLCRGRLLQPALLKCKMHFDGRKCKLLLTSVHEDDSGVYTCKLSTAKDELTCSARLTVRPSLAPLFTRLLEDVEVLEGRAARFDCKISGTPPPVVTWTHFGCPMEESENLRLRQDGGLHSLHIAHVGSEDEGLYAVSAVNTHGQAHCSAQLYVEEPRTAASGPSSKLEKMPSIPEEPEQGELERLSIPDFLRPLQDLEVGLAKEAMLECQVTGLPYPTISWFHNGHRIQSSDDRRMTQYRDVHRLVFPAVGPQHAGVYKSVIANKLGKAACYAHLYVTDVVPGPPDGAPQVVAVTGRMVTLTWNPPRSLDMAIDPDSLTYTVQHQVLGSDQWTALVTGLREPGWAATGLRKGVQHIFRVLSTTVKSSSKPSPPSEPVQLLEHGPTLEEAPAMLDKPDIVYVVEGQPASVTVTFNHVEAQVVWRSCRGALLEARAGVYELSQPDDDQYCLRICRVSRRDMGALTCTARNRHGTQTCSVTLELAEAPRFESIMEDVEVGAGETARFAVVVEGKPLPDIMWYKDEVLLTESSHVSFVYEENECSLVVLSTGAQDGGVYTCTAQNLAGEVSCKAELAVHSAQTAMEVEGVGEDEDHRGRRLSDFYDIHQEIGRGAFSYLRRIVERSSGLEFAAKFIPSQAKPKASARREARLLARLQHDCVLYFHEAFERRRGLVIVTELCTEELLERIARKPTVCESEIRAYMRQVLEGIHYLHQSHVLHLDVKPENLLVWDGAAGEQQVRICDFGNAQELTPGEPQYCQYGTPEFVAPEIVNQSPVSGVTDIWPVGVVAFLCLTGISPFVGENDRTTLMNIRNYNVAFEETTFLSLSREARGFLIKVLVQDRLRPTAEETLEHPWFKTQAKGAEVSTDHLKLFLSRRRWQRSQISYKCHLVLRPIPELLRAPPERVWVTMPRRPPPSGGLSSSSDSEEEELEELPSVPRPLQPEFSGSRVSLTDIPTEDEALGTPETGAATPMDWQEQGRAPSQDQEAPSPEALPSPGQEPAAGASPRRGELRRGSSAESALPRAGPRELGRGLHKAASVELPQRRSPSPGATRLARGGLGEGEYAQRLQALRQRLLRGGPEDGKVSGLRGPLLESLGGRARDPRMARAASSEAAPHHQPPLENRGLQKSSSFSQGEAEPRGRHRRAGAPLEIPVARLGARRLQESPSLSALSEAQPSSPARPSAPKPSTPKSAEPSATTPSDAPQPPAPQPAQDKAPEPRPEPVRASKPAPPPQALQTLALPLTPYAQIIQSLQLSGHAQGPSQGPAAPPSEPKPHAAVFARVASPPPGAPEKRVPSAGGPPVLAEKARVPTVPPRPGSSLSSSIENLESEAVFEAKFKRSRESPLSLGLRLLSRSRSEERGPFRGAEEEDGIYRPSPAGTPLELVRRPERSRSVQDLRAVGEPGLVRRLSLSLSQRLRRTPPAQRHPAWEARGGDGESSEGGSSARGSPVLAMRRRLSFTLERLSSRLQRSGSSEDSGGASGRSTPLFGRLRRATSEGESLRRLGLPHNQLAAQAGATTPSAESLGSEASATSGSSAPGESRSRLRWGFSRPRKDKGLSPPNLSASVQEELGHQYVRSESDFPPVFHIKLKDQVLLEGEAATLLCLPAACPAPHISWMKDKKSLRSEPSVIIVSCKDGRQLLSIPRAGKRHAGLYECSATNVLGSITSSCTVAVARVPGKLAPPEVPQTYQDTALVLWKPGDSRAPCTYTLERRVDGESVWHPVSSGIPDCYYNVTHLPVGVTVRFRVACANRAGQGPFSNSSEKVFVRGTQDSSAVPSAAHQEAPVTSRPARARPPDSPTSLAPPLAPAAPTPPSVTVSPSSPPTPPSQALSSLKAVGPPPQTPPRRHRGLQAARPAEPTLPSTHVTPSEPKPFVLDTGTPIPASTPQGVKPVSSSTPVYVVTSFVSAPPAPEPPAPEPPPEPTKVTVQSLSPAKEVVSSPGSSPRSSPRPEGTTLRQGPPQKPYTFLEEKARGRFGVVRACRENATGRTFVAKIVPYAAEGKRRVLQEYEVLRTLHHERIMSLHEAYITPRYLVLIAESCGNRELLCGLSDRFRYSEDDVATYMVQLLQGLDYLHGHHVLHLDIKPDNLLLAPDNALKIVDFGSAQPYNPQALRPLGHRTGTLEFMAPEMVKGEPIGSATDIWGAGVLTYIMLSGRSPFYEPDPQETEARIVGGRFDAFQLYPNTSQSATLFLRKVLSVHPWSRPSLQDCLAHPWLQDAYLMKLRRQTLTFTTNRLKEFLGEQRRRRAEAATRHKVLLRSYPGGP

SEQ ID NO: 1222 - protein, 374 aa, Homo Sapiens
MSVPAFIDISEEDQAAELRAYLKSKGAEISEENSEGGLHVDLAQIIEACDVCLKEDDKDVESVMNSVVSLLLILEPDKQEALIESLCEKLVKFREGERPSLRLQLLSNLFHGMDKNTPVRYTVYCSLIKVAASCGAIQYIPTELDQVRKWISDWNLTTEKKHTLLRLLYEALVDCKKSDAASKVMVELLGSYTEDNASQARVDAHRCIVRALKDPNAFLFDHLLTLKPVKFLEGELIHDLLTIFVSAKLASYVKFYQNNKDFIDSLGLLHEQNMAKMRLLTFMGMAVENKEISFDTMQQELQIGADDVEAFVIDAVRTKMVYCKIDQTQRKVVVSHSTHRTFGKQQWQQLYDTLNAWKQNLNKVKNSLLSLSDT

SEQ ID NO: 1223 - protein, 578 aa, Homo Sapiens
MACGFRRAIACQLSRVLNLPPENLITSISAVPISQKEEVADFQLSVDSLLEKDNDHSRPDIQVQAKRLAEKLRCDTVVSEISTGQRTVNFKINRELLTKTVLQQVIEDGSKYGLKSELFSGLPQKKIVVEFSSPNVAKKFHVGHLRSTIIGNFIANLKEALGHQVIRINYLGDWGMQFGLLGTGFQLFGYEEKLQSNPLQHLFEVYVQVNKEAADDKSVAKAAQEFFQRLELGDVQALSLWQKFRDLSIEEYIRVYKRLGVYFDEYSGESFYREKSQEVLKLLESKGLLLKTIKGTAVVDLSGNGDPSSICTVMRSDGTSLYATRDLAAAIDRMDKYNFDTMIYVTDKGQKKHFQQVFQMLKIMGYDWAERCQHVPFGVVQGMKTRRGDVTFLEDVLNEIQLRMLQNMASIKTTKELKNPQETAERVGLAALIIQDFKGLLLSDYKFSWDRVFQSRGDTGVFLQYTHARLHSLEETFGCGYLNDFNTACLQEPQSVSILQHLLRFDEVLYKSSQDFQPRHIVSYLLTLSHLAAVAHKTLQIKDSPPEVAGARLHLFKAVRSVLANGMKLLGITPVCRM

SEQ ID NO: 1224 - protein, 743 aa, Homo Sapiens
MLSRLGALLQEAVGAREPSIDLLQAFVEHWKGITHYYIESTDESTPAKKTDIPWRLKQMLDILVYEEQQQAAAGEAGPCLEYLLQHKILETLCTLGKAEYPPGMRQQVFQFFSKVLAQVQHPLLHYLSVHRPVQKLLRLGGTASGSVTEKEEVQFTTVLCSKIQQDPELLAYILEGKKIVGRKKACGEPTALPKDTTSHGDKDCSHDGAPARPQLDGESCGAQALNSHMPAETEELDGGTTESNLITSLLGLCQSKKSRVALKAQENLLLLVSMASPAAATYLVQSSACCPAIVRHLCQLYRSMPVFLDPADIATLEGISWRLPSAPSDEASFPGKEALAAFLGWFDYCDHLITEAHTVVADALAKAVAENFFVETLQPQLLHVSEQSILTSTALLTAMLRQLRSPALLREAVAFLLGTDRQPEAPGDNPHTLYAHLIGHCDHLSDEISITTLRLFEELLQKPHEGIIHSLVLRNLEGRPYVAWGSPEPESYEDTLDLEEDPYFTDSFLDSGFQTPAKPRLAPATSYDGKTAVTEIVNSFLCLVPEEAKTSAFLEETGYDTYVHDAYGLFQECSSRVASWGWPLTPTPLDPHEPERPFFEGHFLRVLFDRMSRILDQPYSLNLQVTSVLSRLALFPHPHIHEYLLDPYISLAPGCRSLFSVLVRVIGDLMQRIQRVPQFPGKLLLVRKQLTGQAPGEQLDHQTLLQGVVVLEEFCKELAAIAFVKFPPHDPRQNVSPAPEGQV

SEQ ID NO: 1225 - protein, 759 aa, Homo Sapiens
MAEGEDMQTFTSIMDALVRISTSMKNMEKELLCPVCQEMYKQPLVLPCTHNVCQACAREVLGQQGYIGHGGDPSSEPTSPASTPSTRSPRLSRRTLPKPDRLDRLLKSGFGTYPGRKRGALHPQVIMFPCPACQGDVELGERGLAGLFRNLTLERVVERYRQSVSVGGAILCQLCKPPPLEATKGCTECRATFCNECFKLFHPWGTQKAQHEPTLPTLSFRPKGLMCPDHKEEVTHYCKTCQRLVCQLCRVRRTHSGHKITPVLSAYQALKDKLTKSLTYILGNQDTVQTQICELEEAVRHTEVSGQQAKEEVSQLVRGLGAVLEEKRASLLQAIEECQQERLARLSAQIQEHRSLLDGSGLVGYAQEVLKETDQPCFVQAAKQLHNRIARATEALQTFRPAASSSFRHCQLDVGREMKLLTELNFLRVPEAPVIDTQRTFAYDQIFLCWRLPPHSPPAWHYTVEFRRTDVPAQPGPTRWQRREEVRGTSALLENPDTGSVYVLRVRGCNKAGYGEYSEDVHLHTPPAPVLHFFLDSRWGASRERLAISKDQRAVRSVPGLPLLLAADRLLTGCHLSVDVVLGDVAVTQGRSYWACAVDPASYLVKVGVGLESKLQESFQGAPDVISPRYDPDSGHDSGAEDATVEASPPFAFLTIGMGKILLGSGASSNAGLTGRDGPTAGCTVPLPPRLGICLDYERGRVSFLDAVSFRGLLECPLDCSGPVCPAFCFIGGGAVQLQEPVGTKPERKVTIGGFAKLD

SEQ ID NO: 1226 - protein, 274 aa, Homo Sapiens
MLTPMVAGGVVFPGLFLLSKNTLQRLPQLRWEEADAVIVSARLVSSVQAIMASTAGYIVSTSCKHIIDDQHWLSSAYTQFAVPYFIYDIYAMFLCHWHKHQVKGHGGDDGAARAPGSTWAIARGYLHKEFLMVLHHAAMVLVCFPLSVVWRQGKGDFFLGCMLMAEVSTPFVCLGKILIQYKQQHTLLHKVNGALMLLSFLCCRVLLFPYLYWAYGRHAGLPLLAVPLAIPAHVNLGAALLLAPQLYWFFLICRGACRLFWPRSRPPPACQAQD

SEQ ID NO: 1227 - protein, 723 aa, Homo Sapiens
MPLFFRKRKPSEEARKRLEYQMCLAKEAGADDILDISKCELSEIPFGAFATCKVLQKKVLIVHTNHLTSLLPKSCSLLSLATIKVLDLHDNQLTALPDDLGQLTALQVLNVERNQLMQLPRSIGNLTQLQTLNVKDNKLKELPDTVGELRSLRTLNISGNEIQRLPQMLAHVRTLEMLSLDASAMVYPPREVCGAGTAAILQFLCKESGLEYYPPSQYLLPILEQDGIENSRDSPDGPTDRFSREELEWQNRFSDYEKRKEQKMLEKLEFERRLELGQREHTQLLQQSSSQKDEILQTVKEEQSRLEQGLSEHQRHLNAERQRLQEQLKQTEQNISSRIQKLLQDNQRQKKSSEILKSLENERIRMEQLMSITQEETESLRRRDVASAMQQMLTESCKNRLIQMAYESQRQNLVQQACSSMAEMDERFQQILSWQQMDQNKAISQILQESAMQKAAFEALQVKKDLMHRQIRSQIKLIETELLQLTQLELKRKSLDTESLQEMISEQRWALSSLLQQLLKEKQQREEELREILTELEAKSETRQENYWLIQYQRLLNQKPLSLKLQEEGMERQLVALLEELSAEHYLPIFAHHRLSLDLLSQMSPGDLAKVGVSEAGLQHEILRRVQELLDAARIQPELKPPMGEVVTPTAPQEPPESVRPSAPPAELEVQASECVVCLEREAQMIFLNCGHVCCCQQCCQPLRTCPLCRQDIAQRLRIYHSS

SEQ ID NO: 1228 - protein, 307 aa, Homo Sapiens
MAEISDLDRQIEQLRRCELIKESEVKALCAKAREILVEESNVQRVDSPVTVCGDIHGQFYDLKELFRVGGDVPETNYLFMGDFVDRGFYSVETFLLLLALKVRYPDRITLIRGNHESRQITQVYGFYDECLRKYGSVTVWRYCTEIFDYLSLSAIIDGKIFCVHGGLSPSIQTLDQIRTIDRKQEVPHDGPMCDLLWSDPEDTTGWGVSPRGAGYLFGSDVVAQFNAANDIDMICRAHQLVMEGYKWHFNETVLTVWSAPNYCYRCGNVAAILELDEHLQKDFIIFEAAPQETRGIPSKKPVADYFL

SEQ ID NO: 1229 - protein, 207 aa, Homo Sapiens
MAPFEPLASGILLLLWLIAPSRACTCVPPHPQTAFCNSDLVIRAKFVGTPEVNQTTLYQRYEIKMTKMYKGFQALGDAADIRFVYTPAMESVCGYFHRSHNRSEEFLIAGKLQDGLLHITTCSFVAPWNSLSLAQRRGFTKTYTVGCEECTVFPCLSIPCKLQSGTHCLWTDQLLQGSEKGFQSRHLACLPREPGLCTWQSLRSQIA

SEQ ID NO: 1230 - protein, 1479 aa, Homo Sapiens
MAKRSRGPGRRCLLALVLFCAWGTLAVVAQKPGAGCPSRCLCFRTTVRCMHLLLEAVPAVAPQTSILDLRFNRIREIQPGAFRRLRNLNTLLLNNNQIKRIPSGAFEDLENLKYLYLYKNEIQSIDRQAFKGLASLEQLYLHFNQIETLDPDSFQHLPKLERLFLHNNRITHLVPGTFNHLESMKRLRLDSNTLHCDCEILWLADLLKTYAESGNAQAAAICEYPRRIQGRSVATITPEELNCERPRITSEPQDADVTSGNTVYFTCRAEGNPKPEIIWLRNNNELSMKTDSRLNLLDDGTLMIQNTQETDQGIYQCMAKNVAGEVKTQEVTLRYFGSPARPTFVIQPQNTEVLVGESVTLECSATGHPPPRISWTRGDRTPLPVDPRVNITPSGGLYIQNVVQGDSGEYACSATNNIDSVHATAFIIVQALPQFTVTPQDRVVIEGQTVDFQCEAKGNPPPVIAWTKGGSQLSVDRRHLVLSSGTLRISGVALHDQGQYECQAVNIIGSQKVVAHLTVQPRVTPVFASIPSDTTVEVGANVQLPCSSQGEPEPAITWNKDGVQVTESGKFHISPEGFLTINDVGPADAGRYECVARNTIGSASVSMVLSVNVPDVSRNGDPFVATSIVEAIATVDRAINSTRTHLFDSRPRSPNDLLALFRYPRDPYTVEQARAGEIFERTLQLIQEHVQHGLMVDLNGTSYHYNDLVSPQYLNLIANLSGCTAHRRVNNCSDMCFHQKYRTHDGTCNNLQHPMWGASLTAFERLLKSVYENGFNTPRGINPHRLYNGHALPMPRLVSTTLIGTETVTPDEQFTHMLMQWGQFLDHDLDSTVVALSQARFSDGQHCSNVCSNDPPCFSVMIPPNDSRARSGARCMFFVRSSPVCGSGMTSLLMNSVYPREQINQLTSYIDASNVYGSTEHEARSIRDLASHRGLLRQGIVQRSGKPLLPFATGPPTECMRDENESPIPCFLAGDHRANEQLGLTSMHTLWFREHNRIATELLKLNPHWDGDTIYYETRKIVGAEIQHITYQHWLPKILGEVGMRTLGEYHGYDPGINAGIFNAFATAAFRFGHTLVNPLLYRLDENFQPIAQDHLPLHKAFFSPFRIVNEGGIDPLLRGLFGVAGKMRVPSQLLNTELTERLFSMAHTVALDLAAINIQRGRDHGIPPYHDYRVYCNLSAAHTFEDLKNEIKNPEIREKLKRLYGSTLNIDLFPALVVEDLVPGSRLGPTLMCLLSTQFKRLRDGDRLWYENPGVFSPAQLTQIKQTSLARILCDNADNITRVQSDVFRVAEFPHGYGSCDEIPRVDLRVWQDCCEDCRTRGQFNAFSYHFRGRRSLEFSYQEDKPTKKTRPRKIPSVGRQGEHLSNSTSAFSTRSDASGTNDFREFVLEMQKTITDLRTQIKKLESRLSTTECVDAGGESHANNTKWKKDACTICECKDGQVTCFVEACPPATCAVPVNIPGACCPVCLQKRAEEKP

SEQ ID NO: 1231 - protein, 332 aa, Homo Sapiens
VPLAALGAPTLDPALAALGLPGANLNSQSLAADQLLKLMSTVDPKLNHVAAGLVSPSLKSDTSSKEIEEAMKRVREAQSLISAAIEPDKKEEKRRHSRSRSRSRRRRTPSSSRHRRSRSRSRRRSHSKSRSRRRSKSPRRRRSHSRERGRRSRSTSKTRDKKKEDKEKKRSKTPPKSYSTARRSRSASRERRRRRSRSGTRSPKKPRSPKRKLSRSPSPRRHKKEKKKDKDKERSRDERERSTSKKKKSKDKEKDRERKSESDKDVKQVTRDYDEEEQGYDSEKEKKEEKKPIETGSPKTKERSVEKGTGDSLRESKVNGDDHHEEDMDMSD

SEQ ID NO: 1232 - protein, 178 aa, Homo Sapiens
MSEVRLPPLRALDDFVLGSARLAAPDPCDPQRWCHRVINNLLYYQTNYLLCFGIGLALAGYVRPLHTLLSALVVAVALGVLVWAAETRAAVRRCRRSHPAACLAAVLAVGLLVLWVAGGACTFLFSIAGPVLLILVHASLRLRNLKNKIENKIESIGLKRTPMGLLLEALGQEQEAGS

SEQ ID NO: 1233 - protein, 594 aa, Homo Sapiens
MAAAVLRDSTSVPVTAEAKLMGFTQGCVTFEDVAIYFSQEEWGLLDEAQRLLYRDVMLENFALITALVCWHGMEDEETPEQSVSVEGVPQVRTPEASPSTQKIQSCDMCVPFLTDILHLTDLPGQELYLTGACAVFHQDQKHHSAEKPLESDMDKASFVQCCLFHESGMPFTSSEVGKDFLAPLGILQPQAIANYEKPNKISKCEEAFHVGISHYKWSQCRRESSHKHTFFHPRVCTGKRLYESSKCGKACCCECSLVQLQRVHPGERPYECSECGKSFSQTSHLNDHRRIHTGERPYVCGQCGKSFSQRATLIKHHRVHTGERPYECGECGKSFSQSSNLIEHCRIHTGERPYECDECGKAFGSKSTLVRHQRTHTGEKPYECGECGKLFRQSFSLVVHQRIHTTARPYECGQCGKSFSLKCGLIQHQLIHSGARPFECDECGKSFSQRTTLNKHHKVHTAERPYVCGECGKAFMFKSKLVRHQRTHTGERPFECSECGKFFRQSYTLVEHQKIHTGLRPYDCGQCGKSFIQKSSLIQHQVVHTGERPYECGKCGKSFTQHSGLILHRKSHTVERPRDSSKCGKPYSPRSNIV

SEQ ID NO: 1234 - protein, 1392 aa, Homo Sapiens
MDTEDDPLLQDVWLEEEQEEEEATGETFLGAQKPGPQPGAGGQCCWRHWPLASRPPASGFWSTLGWAFTNPCCAGLVLFLGCSIPMALSAFMFLYYPPLDIDISYNAFEIRNHEASQRFDALTLALKSQFGSWGRNRRDLADFTSETLQRLISEQLQQLHLGNRSRQASRAPRVIPAASLGGPGPYRDTSAAQKPTANRSGRLRRETPPLEDLAANQSEDPRNQRLSKNGRYQPSIPPHAAVAANQSRARRGASRWDYSRAYVSANTQTHAHWRIELIFLARGDAERNIFTSERLVTIHEIERKIMDHPGFREFCWKPHEVLKDLPLGSYSYCSPPSSLMTYFFPTERGGKIYYDGMGQDLADIRGSLELAMTHPEFYWYVDEGLSADNLKSSLLRSEILFGAPLPNYYSVDDRWEEQRAKFQSFVVTYVAMLAKQSTSKVQVLYGGTDLFDYEVRRTFNNDMLLAFISSSCIAALVYILTSCSVFLSFFGIASIGLSCLVALFLYHVVFGIQYLGILNGVAAFVIVGIGVDDVFVFINTYRQATHLEDPQLRMIHTVQTAGKATFFTSLTTAAAYAANVFSQIPAVHDFGLFMSLIVSCCWLAVLVTMPAALGLWSLYLAPLESSCQTSCHQNCSRKTSLHFPGDVFAAPEQVGGSPAQGPIPYLDDDIPLLEVEEEPVSLELGDVSLVSVSPEGLQPASNTGSRGHLIVQLQELLHHWVLWSAVKSRWVIVGLFVSILILSLVFASRLRPASRAPLLFRPDTNIQVLLDLKYNLSAEGISCITCSGLFQEKPHSLQNNIRTSLEKKRRGSGVPWASRPEATLQDFPGTVYISKVKSQGHPAVYRLSLNASLPAPWQAVSPGDGEVPSFQVYRAPFGNFTKKLTACMSTVGLLQAASPSRKWMLTTLACDAKRGWKFDFSFYVATKEQQHTRKLYFAQSHKPPFHGRVCMAPPGCLLSSSPDGPTKGFFFVPSEKVPKARLSATFGFNPCVNTGCGKPAVRPLVDTGAMVFVVFGIIGVNRTRQVDNHVIGDPGSVVYDSSFDLFKEIGHLCHLCKAIAANSELVKPGGAQCLPSGYSISSFLQMLHPECKELPEPNLLPGQLSHGAVGVREGRVQWISMAFESTTYKGKSSFQTYSDYLRWESFLQQQLQALPEGSVLRRGFQTCEHWKQIFMEIVGVQSALCGLVLSLLICVAAVAVFTTHILLLLPVLLSILGIVCLVVTIMYWSGWEMGAVEAISLSILVGSSVDYCVHLVEGYLLAGENLPPHQAEDARTQRQWRTLEAVRHVGVAIVSSALTTVIATVPLFFCIIAPFAKFGKIVALNTGVSILYTLTVSTALLGIMAPSSFTRTRTSFLKALGAVLLAGALGLGACLVLLQSGYKIPLPAGASL

SEQ ID NO: 1235 - protein, 443 aa, Homo Sapiens
MGGPRAWALLCLGLLLPGGGAAWSIGAAPFSGRRNWCSYVVTRTISCHVQNGTYLQRVLQNCPWPMSCPGSSYRTVVRPTYKVMYKIVTAREWRCCPGHSGVSCEEVAASSASLEPMWSGSTMRRMALRPTAFSGCLNCSKVSELTERLKVLEAKMTMLTVIEQPVPPTPATPEDPAPLWGPPPAQGSPGDGGLQDQVGAWGLPGPTGPKGDAGSRGPMGMRGPPGPQGPPGSPGRAGAVGTPGERGPPGPPGPPGPPGPPAPVGPPHARISQHGDPLLSNTFTETNNHWPQGPTGPPGPPGPMGPPGPPGPTGVPGSPGHIGPPGPTGPKGISGHPGEKGERGLRGEPGPQGSAGQRGEPGPKGDPGEKSHWGEGLHQLREALKILAERVLILETMIGLYEPELGSGAGPAGTGTPSLLRGKRGGHATNYRIVAPRSRDERG

SEQ ID NO: 1236 - protein, 180 aa, Homo Sapiens
MGLTISSLFSRLFGKKQMRILMVGLDAAGKTTILYKLKLGEIVTTIPTIGFNVETVEYKNICFTVWDVGGQDRIRPLWKHYFQNTQGLIFVVDSNDRERIQEVADELQKMLLVDELRDAVLLLFANKQDLPNAMAISEMTDKLGLQSLRNRTWYVQATCATQGTGLYEGLDWLSNELSKR

SEQ ID NO: 1237 - protein, 108 aa, Homo Sapiens
MAVTGDDTAATGDMPTYQIRAPTAALPQGVVMAASPGSLHSPQQLAEEATRKRELRLMKNREAARECRRKKKEYVKCLENRVAVLENQNKTLIEELKALKDLYCHKVE

SEQ ID NO: 1238 - protein, 416 aa, Homo Sapiens
MELRVGNKYRLGRKIGSGSFGDIYLGANIASGEEVAIKLECVKTKHPQLHIESKFYKMMQGGVGIPSIKWCGAEGDYNVMVMELLGPSLEDLFNFCSRKFSLKTVLLLADQMISRIEYIHSKNFIHRDVKPDNFLMGLGKKGNLVYIIDFGLAKKYRDARTHQHIPYRENKNLTGTARYASINTHLGIEQSRRDDLESLGYVLMYFNLGSLPWQGLKAATKRQKYERISEKKMSTPIEVLCKGYPSEFSTYLNFCRSLRFDDKPDYSYLRQLFRNLFHRQGFSYDYVFDWNMLKFGAARNPEDVDRERREHEREERMGQLRGSATRALPPGPPTGATANRLRSAAEPVASTPASRIQPAGNTSPRAISRVDRERKVSMRLHRGAPANVSSSDLTGRQEVSRIPASQTSVPFDHLGK

SEQ ID NO: 1239 - protein, 340 aa, Homo Sapiens
MSELEQLRQEAEQLRNQIRDARKACGDSTLTQITAGLDPVGRIQMRTRRTLRGHLAKIYAMHWGTDSRLLVSASQDGKLIIWDSYTTNKVHAIPLRSSWVMTCAYAPSGNFVACGGLDNICSIYSLKTREGNVRVSRELPGHTGYLSCCRFLDDNQIITSSGDTTCALWDIETGQQTVGFAGHSGDVMSLSLAPDGRTFVSGACDASIKLWDVRDSMCRQTFIGHESDINAVAFFPNGYAFTTGSDDATCRLFDLRADQELLMYSHDNIICGITSVAFSRSGRLLLAGYDDFNCNIWDAMKGDRAGVLAGHDNRVSCLGVTDDGMAVATGSWDSFLKIWN

SEQ ID NO: 1240 - protein, 905 aa, Homo Sapiens
MAKRALHDFIDKYLYAMRLSDETLIDIMTRFRKEMKNGLSRDFNPTATVKMLPTFVRSIPDGSEKGDFIALDLGGSSFRILRVQVNHEKNQNVHMESEVYDTPENIVHGSGSQLFDHVAECLGDFMEKRKIKDKKLPVGFTFSFPCQQSKIDEAILITWTKRFKASGVEGADVVKLLNKAIKKRGDYDANIVAVVNDTVGTMMTCGYDDQHCEVGLIIGTGTNACYMEELRHIDLVEGDEGRMCINTEWGAFGDDGSLEDIRTEFDREIDRGSLNPGKQLFEKMVSGMYLGELVRLILVKMAKEGLLFEGRITPELLTRGKFNTSDVSAIEKNKEGLHNAKEILTRLGVEPSDDDCVSVQHVCTIVSFRSANLVAATLGAILNRLRDNKGTPRLRTTVGVDGSLYKTHPQYSRRFHKTLRRLVPDSDVRFLLSESGSGKGAAMVTAVAYRLAEQHRQIEETLAHFHLTKDMLLEVKKRMRAEMELGLRKQTHNNAVVKMLPSFVRRTPDGTENGDFLALDLGGTNFRVLLVKIRSGKKRTVEMHNKIYAIPIEIMQGTGEELFDHIVSCISDFLDYMGIKGPRMPLGFTFSFPCQQTSLDAGILITWTKGFKATDCVGHDVVTLLRDAIKRREEFDLDVVAVVNDTVGTMMTCAYEEPTCEVGLIVGTGSNACYMEEMKNVEMVEGDQGQMCINMEWGAFGDNGCLDDIRTHYDRLVDEYSLNAGKQRYEKMISGMYLGEIVRNILIDFTKKGFLFRGQISETLKTRGIFETKFLSQIESDRLALLQVRAILQQLGLNSTCDDSILVKTVCGVVSRRAAQLCGAGMAAVVDKIRENRGLDRLNVTVGVDGTLYKLHPHFSRIMHQTVKELSPKCNVSFLLSEDGSGKGAALITAVGVRLRTEASS

SEQ ID NO: 1241 - protein, 246 aa, Homo Sapiens
MYQVSGQRPSGCDAPYGAPSAAPGPAQTLSLLPGLEVVTGSTHPAEAAPEEGSLEEAATPMPQGNGPGIPQGLDSTDLDVPTEAVTCQPQGNPLGCTPLLPNDSGHPSELGGTRRAGNGALGGPKAHRKLQTHPSLASQGSKKSKSSSKSTTSQIPLQAQEDCCVHCILSCLFCEFLTLCNIVLDCATCGSCSSEDSCLCCCCCGSGECADCDLPCDLDCGILDACCESADCLEICMECCGLCFSS

SEQ ID NO: 1242 - protein, 156 aa, Homo Sapiens
MPMAGLLKGLVRQLERFSVQQQASKMPPKGKSGSGKAGKGGAASGSDSADKKAQGPKGGGNAVKVRHILCEKHGKIMEAMEKLKSGMRFNEVAAQYSEDKARQGGDLGWMTRGSMVGPFQEAAFALPVSGMDKPVFTDPPVKTKFGYHIIMVEGRK

SEQ ID NO: 1243 - protein, 373 aa, Homo Sapiens
MLLGLAAMELKVWVDGIQRVVCGVSEQTTCQEVVIALAQAIGQTGRFVLVQRLREKERQLLPQECPVGAQATCGQFASDVQFVLRRTGPSLAGRPSSDSCPPPERCLIRASLPVKPRAALGCEPRKTLTPEPAPSLSRPGPAAPVTPTPGCCTDLRGLELRVQRNAEELGHEAFWEQELRREQAREREGQARLQALSAATAEHAARLQALDAQARALEAELQLAAEAPGPPSPMASATERLHQDLAVQERQSAEVQGSLALVSRALEAAERALQAQAQELEELNRELRQCNLQQFIQQTGAALPPPPRPDRGPPGTQGPLPPAREESLLGAPSESHAGAQPRPRGGPHDAELLEVAAAPAPEWCPLAAQPQAL

SEQ ID NO: 1244 - protein, 528 aa, Homo Sapiens
MGDAPSPEEKLHLITRNLQEVLGEEKLKEILKERELKIYWGTATTGKPHVAYFVPMSKIADFLKAGCEVTILFADLHAYLDNMKAPWELLELRVSYYENVIKAMLESIGVPLEKLKFIKGTDYQLSKEYTLDVYRLSSVVTQHDSKKAGAEVVKQVEHPLLSGLLYPGLQALDEEYLKVDAQFGGIDQRKIFTFAEKYLPALGYSKRVHLMNPMVPGLTGSKMSSSEEESKIDLLDRKEDVKKKLKKAFCEPGNVENNGVLSFIKHVLFPLKSEFVILRDEKWGGNKTYTAYVDLEKDFAAEVVHPGDLKNSVEVALNKLLDPIREKFNTPALKKLASAAYPDPSKQKPMAKGPAKNSEPEEVIPSRLDIRVGKIITVEKHPDADSLYVEKIDVGEAEPRTVVSGLVQFVPKEELQDRLVVVLCNLKPQKMRGVESQGMLLCASIEGINRQVEPLDPPAGSAPGEHVFVKGYEKGQPDEELKPKKKVFEKLQADFKISEECIAQWKQTNFMTKLGSISCKSLKGGNIS

SEQ ID NO: 1245 - protein, 229 aa, Homo Sapiens
MGNASFGSKEQKLLKRLRLLPALLILRAFKPHRKIRDYRVVVVGTAGVGKSTLLHKWASGNFRHEYLPTIENTYCQLLGCSHGVLSLHITDSKSGDGNRALQRHVIARGHAFVLVYSVTKKETLEELKAFYELICKIKGNNLHKFPIVLVGNKSDDTHREVALNDGATCAMEWNCAFMEISAKTDVNVQELFHMLLNYKKKPTTGLQEPEKKSQMPNTTEKLLDKCIIM

SEQ ID NO: 1246 - protein, 1882 aa, Homo Sapiens
MVGRGVPLCAAQPAVAEGGPAREPPPLLEVSPRKRLPAGPDQDPCGSRPAPEGAGAGPEQGHSAGGGGWCRHCHTKLVELKRQAWKLVSGPGTTLRDPCLSALLLDKLPAPGALPACRPEAERRCDVCATHLQQLTREAMHLLQAPASHEDLDAPHGGPSLAPPSTTTSSRDTPGPAGPAGRQPGRAGPDRTKGLAWSPGPSVQVSVAPAGLGGALSTVTIQAQQCLEGMWSVSRVNSFLPPACLAEAAVAAVAVADTVRECPPVAGPDGLSKAWGRGGVCTSALVTPTPGSVGGSTGPSAAASFFIRAMQKLSLASKRKKPHPPPPPATRGTSTYPTDFSGVLQLWPPPAPPCLLRAASKTKDNPGSIGKVKVMLRIWPAQGAQRSAEAMSFLKVDPRKKQVILYDPAAGPPGSAGPRRAATAAVPKMFAFDAVFPQDSEQAEVCSGTVADVLQSVVSGADGCIFSFGHMSLGKSYTMIGKDSSPQSLGIVPCAISWLFRLIEERRERTGTRFSVRVSAVEVCGRDQSLRDLLAEVAPGSLQDTQSPGVYLREDPVCGAQLQNQSELRAPTAEKAAFYLDAALAARSTSRAGCGEDARRSSHMLFTLHVYQYRMEKCGRGGMSGGRSRLHLIDLGSCEAAAGRAGEAAGGPLCLSLSALGSVILALVNGAKHVPYRDHRLTMLLRESLATAGCRTTMIAHVSDAPAQHAETLSTVQLAARIHRLRRKKAKYASSSSGGESSCEEGRARRPPHLRPFHPRTVALDPDRTPPCLPGDPDYSSSSEQSCDTVIYVGPGGAALSDRELTDNEGPPDFVPIIPALSRHRPSKGPRDADHFRCSTFAELQERLECMDGNEGPSGGPGGTDGAQASPARGGRKPSPPEAASPRKAVGTPMAASTPRGSSGPDTHQGTPEPCKAIVWGDQREDSSAWPELLVPEKAAVSGGRRPLPSPAPPPPQLLEACRAPEEPGGGGTDGVARTPPVGMSGQVAGSPMLPGATCPRLAAGSRCPERGLLTTTVTLQRPVELNGEDELVFTVVEELSLGALAGAGRPTSLASFDSDCSLRALASGSRPVSIISSINDEFDAYTSQAPEGGPLEGAAWAGSSHGSSISSWLSEVSVCTADSRDPTPQPRFSPDSLAGLDPGGPPALDGSLGDGSSGFLGPDRPDSPGPTWGPCPGEVAAVAPSRPGREPQAGPSRWASAAQTIHSSLPRKPRTASATTRVGCARLGQSPPGRGGLFEDPWLLRVGECDTQAASAGRAPSPTLGSPRLPEAQVMLACAQRVVDGCEVAARAARRPEAVARIPPLRRGATTLGVTTPAVSWGDAPTEVVACSGSLKASPTSKKGLAPKAGFLPRPSGAAPPAPPTRKSSLEQRSSPASAPPHAVNPARVGAAAVLRGEEEPRPSSRADHSVPRATSSLKARASKVEAAHRLAGHASLERYEGLAHSSSKGREAPGRPPRAVPKLGVPPSSPTHGPAPACRSGAAKAVGAPKPPVGGGKGRGLVAGGSRALGPSVKLSTASVTGRSPGGPVAGPRAAPRAGPSVGAKAGRGTVMGTKQALRAAHSRVHELSASGAPGRGGSSWGSADSDSGHDSGVNVGEERPPTGPALPSPYSKVTAPRRPQRYSSGHGSDNSSVLSGELPPAMGRTALFHHSGGSSGYESLRRDSEATGSASSAPDSMSESGAASPGARTRSLKSPKKRATGLQRRRLIPAPLPDTTALGRKPSLPGQWVDLPPPLAGSLKEPFEIKVYEIDDVERLQRPRPTPREAPTQGLACVSTRLRLAERRQQRLREVQAKHKHLCEELAETQGRLMLEPGRWLEQFEVDPELEPESAEYLAALERATAALEQCVNLCKAHVMMVTCFDISVAASAAIPGPQEVDV

SEQ ID NO: 1247 - protein, 426 aa, Homo Sapiens
MSGGVYGGDEVGALVFDIGSFSVRAGYAGEDCPKADFPTTVGLLAAEEGGGLELEGDKEKKGKIFHIDTNALHVPRDGAEVMSPLKNGMIEDWECFRAILDHTYSKHVKSEPNLHPVLMSEAPWNTRAKREKLTELMFEQYNIPAFFLCKTAVLTAFANGRSTGLVLDSGATHTTAIPVHDGYVLQQGIVKSPLAGDFISMQCRELFQEMAIDIIPPYMIAAKEPVREGAPPNWKKKEKLPQVSKSWHNYMCNEVIQDFQASVLQVSDSPYDEQVAAQMPTVHYEMPNGYNTDYGAERLRIPEGLFDPSNVKGLSGNTMLGVGHVVTTSIGMCDIDIRPGLYGSVIVTGGNTLLQGFTDRLNRELSQKTPPSMRLKLIASNSTMERKFSPWIGGSILASLGTFQQMWISKQEYEEGGKQCVERKCP

SEQ ID NO: 1248 - protein, 305 aa, Homo Sapiens
MGIQTSPVLLASLGVGLVTLLGLAVGSYLVRRSRRPQVTLLDPNEKYLLRLLDKTTVSHNTKRFRFALPTAHHTLGLPVGKHIYLSTRIDGSLVIRPYTPVTSDEDQGYVDLVIKVYLKGVHPKFPEGGKMSQYLDSLKVGDVVEFRGPSGLLTYTGKGHFNIQPNKKSPPEPRVAKKLGMIAGGTGITPMLQLIRAILKVPEDPTQCFLLFANQTEKDIILREDLEELQARYPNRFKLWFTLDHPPKDWAYSKGFVTADMIREHLPAPGDDVLVLLCGPPPMVQLACHPNLDKLGYSQKMRFTY

SEQ ID NO: 1249 - protein, 248 aa, Homo Sapiens
MRLIQNMCTIAEYPAPGNAAASDCCVGAAGRRLVKIAVVGASGVGKTALVVRFLTKRFIGDYERNAGNLYTRQVQIEGETLALQVQDTPGIQVHENSLSCSEQLNRCIRWADAVVIVFSITDYKSYELISQLHQHVQQLHLGTRLPVVVVANKADLLHIKQVDPQLGLQLASMLGCSFYEVSVSENYNDVYSAFHVLCKEVSHKQQPSSTPEKRRTSLIPRPKSPNMQDLKRRFKQALSAKVRTVTSV

SEQ ID NO: 1250 - protein, 714 aa, Homo Sapiens
MARAGSCGGAAAGAGRPEPWELSLEEVLKAYEQPLNEEQAWAVCFQGCRGLRGSPGRRLRDTGDLLLRGDGSVGAREPEAAEPATMVVPLASSEAQTVQSLGFAIYRALDWGLDESEERELSPQLERLIDLMANNDSEDSGCGAADEGYGGPEEEEEAEGVPRSVRTFAQAMRLCAARLTDPRGAQAHYQAVCRALFVETLELRAFLARVREAKEMLQKLREDEPHLETPRAELDSLGHTDWARLWVQLMRELRRGVKLKKVQEQEFNPLPTEFQLTPFEMLMQDIRARNYKLRKVMVDGDIPPRVKKDAHELILDFIRSRPPLKQVSERRLRPLPPKQRSLHEKILEEIKQERRLRPVRGEGWAARGFGSLPCILNACSGDAKSTSCINLSVTDAGGSAQRPRPRVLLKAPTLAEMEEMNTSEEEESPCGEVTLKRDRSFSEHDLAQLRSEVASGLQSATHPPGGTEPPRPRAGSAHVWRPGSRDQGTCPASVSDPSHPLLSNRGSSGDRPEASMTPDAKHLWLEFSHPVESLALTVEEVMDVRRVLVKAEMEKFLQNKELFSSLKKGKICCCCRAKFPLFSWPPSCLFCKRAVCTSCSIKMKMPSKKFGHIPVYTLGFESPQRVSAAKTAPIQRRDIFQSLQGPQWQSVEEAFPHIYSHGCVLKDVCSECTSFVADVVRSSRKSVDVLNTTPRRSRQTQSLYIPNTRTLDFK

SEQ ID NO: 1251 - protein, 134 aa, Homo Sapiens
CLCGGRAKPCVPLGTRVYSPPEWIRYHRYHGRSATVWSLGVLLYDMVCGDIPFEQDEEILRGRLLFRRRVSPECQQLIRWCLSLRPSERPSLDQIAAHPWMLGADGGAPESCDLRLCTLDPDDVASTTSSSESL

SEQ ID NO: 1252 - protein, 348 aa, Homo Sapiens
MAEKVLVTGGAGYIGSHTVLELLEAGYLPVVIDNFHNAFRGGGSLPESLRRVQELTGRSVEFEEMDILDQGALQRLFKKYSFMAVIHFAGLKAVGESVQKPLDYYRVNLTGTIQLLEIMKAHGVKNLVFSSSATVYGNPQYLPLDEAHPTGGCTNPYGKSKFFIEEMIRDLCQADKTWNAVLLRYFNPTGAHASGCIGEDPQGIPNNLMPYVSQVAIGRREALNVFGNDYDTEDGTGVRDYIHVVDLAKGHIAALRKLKEQCGCRIYNLGTGTGYSVLQMVQAMEKASGKKIPYKVVARREGDVAACYANPSLAQEELGWTAALGLDRMCEDLWRWQKQNPSGFGTQA

SEQ ID NO: 1253 - protein, 306 aa, Homo Sapiens
MALVFEKCELATCTPREPGVAGGDVCSSDSFNEDIAVFAKQVRAEKPLFSSNPELDNLMIQAIQVLRFHLLELEKVHELCDNFCHRYISCLKGKMPIDLVIDERDGSSKSDHEELSGSSTNLADHNPSSWRDHDDATSTHSAGTPGPSSGGHASQSGDNSSEQGDGLDNSVASPGTGDDDDPDKDKKRQKKRGIFPKVATNIMRAWLFQHLTHPYPSEEQKKQLAQDTGLTILQVNNWFINARRRIVQPMIDQSNRAVSQGAAYSPEGQPMGSFVLDGQQHMGIRPAGPMSGMGMNMGMDGQWHYM

SEQ ID NO: 1254 - protein, 476 aa, Homo Sapiens
MSGPTWLPPKQPEPARAPQGRAIPRGTPGPPPAHGAALQPHPRVNFCPLPSEQCYQAPGGPEDRGPAWVGSHGVLQHTQGLPADRGGLRPGSLDAEIDLLSSTLAELNGGRGHASRRPDRQAYEPPPPPAYRTGSLKPNPASPLPASPYGGPTPASYTTASTPAGPAFPVQVKVAQPVRGCGPPRRGASQASGPLPGPHFPLPGRGEVWGPGYRSQREPGPGAKEEAAGVSGPAGRGRGGEHGPQVPLSQPPEDELDRLTKKLVHDMNHPPSGEYFGQCGGCGEDVVGDGAGVVALDRVFHVGCFVCSTCRAQLRGQHFYAVERRAYCEGCYVATLEKCATCSQPILDRILRAMGKAYHPGCFTCVVCHRGLDGIPFTVDATSQIHCIEDFHRKFAPRCSVCGGAIMPEPGQEETVRIVALDRSFHIGCYKCEECGLLLSSEGECQGCYPLDGHILCKACSAWRIQELSATVTTDC

SEQ ID NO: 1255 - protein, 706 aa, Homo Sapiens
MALPSPQVLMGLPALLMGPAQHTSWPCGSAVPTLKSMVTFEDVAVYFSQEEWELLDAAQRHLYHSVMLENLELVTSLGSWHGVEGEGAHPKQNVSVEVLQVRIPNADPSTKKANSCDMCGPFLKDILHLAEHQGTQSEEKPYTCGACGRDFWLNANLHQHQKEHSGGKPFRWYKDRDALMKSSKVHLSENPFTCREGGKVILGSCDLLQLQAVDSGQKPYSNLGQLPEVCTTQKLFECSNCGKAFLKSSTLPNHLRTHSEEIPFTCPTGGNFLEEKSILGNKKFHTGEIPHVCKECGKAFSHSSKLRKHQKFHTEVKYYECIACGKTFNHKLTFVHHQRIHSGERPYECDECGKAFSNRSHLIRHEKVHTGERPFECLKCGRAFSQSSNFLRHQKVHTQVRPYECSQCGKSFSRSSALIQHWRVHTGERPYECSECGRAFNNNSNLAQHQKVHTGERPFECSECGRDFSQSSHLLRHQKVHTGERPFECCDCGKAFSNSSTLIQHQKVHTGQRPYECSECRKSFSRSSSLIQHWRIHTGEKPYECSECGKAFAHSSTLIEHWRVHTKERPYECNECGKFFSQNSILIKHQKVHTGEKPYKCSECGKFFSRKSSLICHWRVHTGERPYECSECGRAFSSNSHLVRHQRVHTQERPYECIQCGKAFSERSTLVRHQKVHTRERTYECSQCGKLFSHLCNLAQHKKIHT

SEQ ID NO: 1256 - protein, 1194 aa, Homo Sapiens
MMCEVMPTISEDGRRGSALGPDEAGGELERLMVTMLTERERLLETLREAQDGLATAQLRLRELGHEKDSLQRQLSIALPQEFAALTKELNLCREQLLEREEEIAELKAERNNTRLLLEHLECLVSRHERSLRMTVVKRQAQSPGGVSSEVEVLKALKSLFEHHKALDEKVRERLRMALERVAVLEEELELSNQETLNLREQLSRRRSGLEEPGKDGDGQTLANGLGPGGDSNRRTAELEEALERQRAEVCQLRERLAVLCRQMSQLEEELGTAHRELGKAEEANSKLQRDLKEALAQREDMEERITTLEKRYLSAQREATSLHDANDKLENELASKESLYRQSEEKSRQLAEWLDDAKQKLQQTLQKAETLPEIEAQLAQRVAALNKAEERHGNFEERLRQLEAQLEEKNQELQRARQREKMNDDHNKRLSETVDKLLSESNERLQLHLKERMGALEEKNSLSEEIANMKKLQDELLLNKEQLLAEMERMQMEIDQLRGRPPSSYSRSLPGSALELRYSQAPTLPSGAHLDPYVAGSGRAGKRGRWSGVKEEPSKDWERSAPAGSIPPPFPGELDGSDEEEAEGMFGAELLSPSGQADVQTLAIMLQEQLEAINKEIKLIQEEKETTEQRAEELESRVSSSGLDSLGRYRSSCSLPPSLTTSTLASPSPPSSGHSTPRLAPPSPAREGTDKANHVPKEEAGAPRGEGPAIPGDTPPPTPRSARLERMTQALALQAGSLEDGGPPRGSEGTPDSLHKAPKKKSIKSSIGRLFGKKEKGRMGPPGRDSSSLAGTPSDETLATDPLGLAKLTGPGDKDRRNKRKHELLEEACRQGLPFAAWDGPTVVSWLELWVGMPAWYVAACRANVKSGAIMANLSDTEIQREIGISNPLHRLKLRLAIQEMVSLTSPSAPASSRTSTGNVWMTHEEMESLTATTKPETKEISWEQILAYGDMNHEWVGNDWLPSLGLPQYRSYFMESLVDARMLDHLNKKELRGQLKMVDSFHRVSLHYGIMCLKRLNYDRKDLERRREESQTQIRDVMVWSNERVMGWVSGLGLKEFATNLTESGVHGALLALDETFDYSDLALLLQIPTQNAQARQLLEKEFSNLISLGTDRRLDEDSAKSFSRSPSWRKMFREKDLRGVTPDSAEMLPPNFRSAAAGALGSPGLPLRKLQPEGQTSGSSRADGVSVRTYSC

SEQ ID NO: 1257 - protein, 165 aa, Homo Sapiens
MVNPGSSSQPPPVTAGSLSWKRCAGCGGKIADRFLLYAMDSYWHSRCLKCSCCQAQLGDIGTSCYTKSGMILCRNDYIRLFGNSGACSACGQSIPASELVMRAQGNVYHLKCFTCSTCRNRLVPGDRFHYINGSLFCEHDRPTALINGHLNSLQSNPLLPDQKVC

SEQ ID NO: 1258 - protein, 986 aa, Homo Sapiens
MSRIESLTRARIDRSRELASKTREKEKMKEAKDARYTNGHLFTTISVSGMTMCYACNKSITAKEALICPTCNVTIHNRCKDTLANCTKVKQKQQKAALLKNNTALQSVSLRSKTTIRERPSSAIYPSDSFRQSLLGSRRGRSSLSLAKSVSTTNIAGHFNDESPLGLRRILSQSTDSLNMRNRTLSVESLIDEAEVIYSELMSDFEMDEKDFAADSWSLAVDSSFLQQHKKEVMKQQDVIYELIQTELHHVRTLKIMTRLFRTGMLEELHLEPGVVQGLFPCVDELSDIHTRFLSQLLERRRQALCPGSTRNFVIHRLGDLLISQFSGPSAEQMCKTYSEFCSRHSKALKLYKELYARDKRFQQFIRKVTRPAVLKRHGVQECILLVTQRITKYPLLISRILQHSHGIEEERQDLTTALGLVKELLSNVDEGIYQLEKGARLQEIYNRMDPRAQTPVPGKGPFGREELLRRKLIHDGCLLWKTATGRFKDVLVLLMTDVLVFLQEKDQKYIFPTLDKPSVVSLQNLIVRDIANQEKGMFLISAAPPEMYEVHTASRDDRSTWIRVIQQSVRTCPSREDFPLIETEDEAYLRRIKMELQQKDRALVELLREKVGLFAEMTHFQAEEDGGSGMALPTLPRGLFRSESLESPRGERLLQDAIREVEGLKDLLVGPGVELLLTPREPALPLEPDSGGNTSPGVTANGEARTFNGSIELCRADSDSSQRDRNGNQLRSPQEEALQRLVNLYGLLHGLQAAVAQQDTLMEARFPEGPERREKLCRANSRDGEAGRAGAAPVAPEKQATELALLQRQHALLQEELRRCRRLGEERATEAGSLEARLRESEQARALLEREAEEARRQLAALGQTEPLPAEAPWARRPVDPRRRSLPAGDALYLSFNPPQPSRGTDRLDLPVTTRSVHRNFEDRERQELGSPEERLQDSSDPDTGSEEEGSSRLSPPHSPRDFTRMQDIPEETESRDGEAVASES

SEQ ID NO: 1259 - protein, 443 aa, Homo Sapiens
MQRRDDPAARMSRSSGRSGSMDPSGAHPSVRQTPSRQPPLPHRSRGGGGGSRGGARASPATQPPPLLPPSATGPDATVGGPAPTPLLPPSATASVKMEPENKYLPELMAEKDSLDPSFTHAMQLLTAEIEKIQKGDSKKDDEENYLDLFSHKNMKLKERVLIPVKQYPKFNFVGKILGPQGNTIKRLQEETGAKISVLGKGSMRDKAKEEELRKGGDPKYAHLNMDLHVFIEVFGPPCEAYALMAHAMEEVKKFLVPDMMDDICQEQFLELSYLNGVPEPSRGRGVPVRGRGAAPPPPPVPRGRGVGPPRGALVRGTPVRGAITRGATVTRGVPPPPTVRGAPAPRARTAGIQRIPLPPPPAPETYEEYGYDDTYAEQSYEGYEGYYSQSQGDSEYYDYGHGEVQDSYEAYGQDDWNGTRPSLKAPPARPVKGAYREHPYGRY

SEQ ID NO: 1260 - protein, 359 aa, Homo Sapiens
MADQDPAGISPLQQMVASGTGAVVTSLFMTPLDVVKVRLQSQRPSMASELMPSSRLWSLSYTKLPSSLQSTGKCLLYCNGVLEPLYLCPNGARCATWFQDPTRFTGTMDAFVKIVRHEGTRTLWSGLPATLVMTVPATAIYFTAYDQLKAFLCGRALTSDLYAPMVAGALARLGTVTVISPLELMRTKLQAQHVSYRELGACVRTAVAQGGWRSLWLGWGPTALRDVPFSALYWFNYELVKSWLNGFRPKDQTSVGMSFVAGGISGTVAAVLTLPFDVVKTQRQVALGAMEAVRVNPLHVDSTWLLLRRIRAESGTKGLFAGFLPRIIKAAPSCAIMISTYEFGKSFFQRLNQDRLLGG

SEQ ID NO: 1261 - protein, 325 aa, Homo Sapiens
MSAQAQMRALLDQLMGTARDGDETRQRVKFTDDRVCKSHLLDCCPHDILAGTRMDLGECTKIHDLALRADYEIASKERDLFFELDAMDHLESFIAECDRRTELAKKRLAETQEEISAEVSAKAEKVHELNEEIGKLLAKAEQLGAEGNVDESQKILMEVEKVRAKKKEAEEEYRNSMPASSFQQQKLRVCEVCSAYLGLHDNDRRLADHFGGKLHLGFIQIREKLDQLRKTVAEKQEKRNQDRLRRREEREREERLSRRSGSRTRDRRRSRSRDRRRRRSRSTSRERRKLSRSRSRDRHRRHRSRSRSHSRGHRRASRDRSAKYK

SEQ ID NO: 1262 - protein, 105 aa, Homo Sapiens
MSIYFPIHCPDYLRSAKMTEVMMNTQPMEEIGLSPRKDGLSYQIFPDPSDFDRCCKLKDRLPSIVVEPTEGEVESGELRWPPEEFLVQEDEQDNCEETAKENKEQ

SEQ ID NO: 1263 - protein, 1321 aa, Homo Sapiens
MQCLAAALKDETNMSGGGEQADILPANYVVKDRWKVLKKIGGGGFGEIYEAMDLLTRENVALKVESAQQPKQVLKMEVAVLKKLQGKDHVCRFIGCGRNEKFNYVVMQLQGRNLADLRRSQPRGTFTLSTTLRLGKQILESIEAIHSVGFLHRDIKPSNFAMGRLPSTYRKCYMLDFGLARQYTNTTGDVRPPRNVAGFRGTVRYASVNAHKNREMGRHDDLWSLFYMLVEFAVGQLPWRKIKDKEQVGMIKEKYEHRMLLKHMPSEFHLFLDHIASLDYFTKPDYQLIMSVFENSMKERGIAENEAFDWEKAGTDALLSTSTSTPPQQNTRQTAAMFGVVNVTPVPGDLLRENTEDVLQGEHLSDQENAPPILPGRPSEGLGPSPHLVPHPGGPEAEVWEETDVNRNKLRINIGKSPCVEEEQSRGMGVPSSPVRAPPDSPTTPVRSLRYRRVNSPESERLSTADGRVELPERRSRMDLPGSPSRQACSSQPAQMLSVDTGHADRQASGRMDVSASVEQEALSNAFRSVPLAEEEDFDSKEWVIIDKETELKDFPPGAEPSTSGTTDEEPEELRPLPEEGEERRRLGAEPTVRPRGRSMQALAEEDLQHLPPQPLPPQLSQGDGRSETSQPPTPGSPSHSPLHSGPRPRRRESDPTGPQRQVFSVAPPFEVNGLPRAVPLSLPYQDFKRDLSDYRERARLLNRVRRVGFSHMLLTTPQVPLAPVQPQANGKEEEEEEEEDEEEEEEDEEEEEEEEEEEEEEEEEEEEEEEAAAAVALGEVLGPRSGSSSEGSERSTDRSQEGAPSTLLADDQKESRGRASMADGDLEPEEGSKTLVLVSPGDMKKSPVTAELAPDPDLGTLAALTPQHERPQPTGSQLDVSEPGTLSSVLKSEPKPPGPGAGLGAGTVTTGVGGVAVTSSPFTKVERTFVHIAEKTHLNVMSSGGQALRSEEFSAGGELGLELASDGGAVEEGARAPLENGLALSGLNGAEIEGSALSGAPRETPSEMATNSLPNGPALADGPAPVSPLEPSPEKVATISPRRHAMPGSRPRSRIPVLLSEEDTGSEPSGSLSAKERWSKRARPQQDLARLVMEKRQGRLLLRLASGASSSSSEEQRRASETLSGTGSEEDTPASEPAAALPRKSGRAAATRSRIPRPIGLRMPMPVAAQQPASRSHGAAPALDTAITSRLQLQTPPGSATAADLRPKQPPGRGLGPGRAQAGARPPAPRSPRLPASTSAARNASASPRSQSLSRRESPSPSHQARPGVPPPRGVPPARAQPDGTPSPGGSKKGPRGKLQAQRATTKGRAGGAEGRAGAR

SEQ ID NO: 1264 - protein, 477 aa, Homo Sapiens
MATYTCITCRVAFRDADMQRAHYKTDWHRYNLRRKVASMAPVTAEGFQERVRAQRAVAEEESKGSATYCTVCSKKFASFNAYENHLKSRRHVELEKKAVQAVNRKVEMMNEKNLEKGLGVDSVDKDAMNAAIQQAIKAQPSMSPKKAPPAPAKEARNVVAVGTGGRGTHDRDPSEKPPRLQWFEQQAKKLAKQQEEDSEEEEEDLDGDDWEDIDSDEELECEDTEAMDDVVEQDAEEEEAEEGPPLGAIPITDCLFCSHHSSSLMKNVAHMTKDHSFFIPDIEYLSDIKGLIKYLGEKVGVGKICLWCNEKGKSFYSTEAVQAHMNDKSHCKLFTDGDAALEFADFYDFRSSYPDHKEGEDPNKAEELPSEKNLEYDDETMELILPSGARVGHRSLMRYYKQRFGLSRAVAVAKNRKAVGRVLQQYRALGWTGSTGAALMRERDMQYVQRMKSKWMLKTGMKNNATKQMHFRVQVRF

SEQ ID NO: 1265 - protein, 821 aa, Homo Sapiens
MDPECAQLLPALCAVLVDPRQPVADDTCLEKLLDWFKTVTEGESSVVLLQEHPCLVELLSHVLKVQDLSSGVLSFSLRLAGTFAAQENCFQYLQQGELLPGLFGEPGPLGRATWAVPTVRSGWIQGLRSLAQHPSALRFLADHGAVDTIFSLQGDSSLFVASAASQLLVHVLALSMRGGAEGQPCLPGGDWPACAQKIMDHVEESLCSAATPKVTQALNVLTTTFGRCQSPWTEALWVRLSPRVACLLERDPIPAAHSFVDLLLCVARSPVFSSSDGSLWETVARALSCLGPTHMGPLALGILKLEHCPQALRTQAFQVLLQPLACVLKATVQAPGPPGLLDGTADDATTVDTLLASKSSCAGLLCRTLAHLEELQPLPQRPSPWPQASLLGATVTVLRLCDGSAAPASSVGGHLCGTLAGCVRVQRAALDFLGTLSQGTGPQELVTQALAVLLECLESPGSSPTVLKKAFQATLRWLLSSPKTPGCSDLGPLIPQFLRELFPVLQKRLCHPCWEVRDSALEFLTQLSRHWGGQADFRCALLASEVPQLALQLLQDPESYVRASAVTAMGQLSSQGLHAPTSPEHAEARQSLFLELLHILSVDSEGFPRRAVMQVFTEWLRDGHADAAQDTEQFVATVLQAASRDLDWEVRAQGLELALVFLGQTLGPPRTHCPYAVALPEVAPAQPLTEALRALCHVGLFDFAFCALFDCDRPVAQKSCDLLLFLRDKIASYSSLREARGSPNTASAEATLPRWRAGEQAQPPGDQEPEAVLAMLRSLDLEGLRSTLAESSDHVEKSPQSLLQDMLATGGFLQGDEADCY

SEQ ID NO: 1266 - protein, 530 aa, Homo Sapiens
MAALRRLLWPPPRVSPPLCAHQPLLGPWGRPAVTTLGLPGRPFSSREDEERAVAEAAWRRRRRWGELSVAAAAGGGLVGLVCYQLYGDPRAGSPATGRPSKSAATEPEDPPRGRGMLPIPVAAAKETVAIGRTDIEDLDLYATSRERRFRLFASIECEGQLFMTPYDFILAVTTDEPKVAKTWKSLSKQELNQMLAETPPVWKGSSKLFRNLKEKGVISYTEYLFLLCILTKPHAGFRIAFNMFDTDGNEMVDKKEFLVLQEIFRKKNEKREIKGDEEKRAMLRLQLYGYHSPTNSVLKTDAEELVSRSYWDTLRRNTSQALFSDLAERADDITSLVTDTTLLVHFFGKKGKAELNFEDFYRFMDNLQTEVLEIEFLSYSNGMNTISEEDFAHILLRYTNVENTSVFLENVRYSIPEEKGITFDEFRSFFQFLNNLEDFAIALNMYNFASRSIGQDEFKRAVYVATGLKFSPHLVNTVFKIFDVDKDDQLSYKEFIGIMKDRLHRGFRGYKTVQKYPTFKSCLKKELHSR

SEQ ID NO: 1267 - protein, 521 aa, Homo Sapiens
MLPRRPLAWPAWLLRGAPGAAGSWGRPVGPLARRGCCSAPGTPEVPLTRERYPVRRLPFSTVSKQDLAAFERIVPGGVVTDPEALQAPNVDWLRTLRGCSKVLLRPRTSEEVSHILRHCHERNLAVNPQGGNTGMVGGSVPVFDEIILSTARMNRVLSFHSVSGILVCQAGCVLEELSRYVEERDFIMPLDLGAKGSCHIGGNVATNAGGLRFLRYGSLHGTVLGLEVVLADGTVLDCLTSLRKDNTGYDLKQLFIGSEGTLGIITTVSILCPPKPRAVNVAFLGCPGFAEVLQTFSTCKGMLGEILSAFEFMDAVCMQLVGRHLHLASPVQESPFYVLIETSGSNAGHDAEKLGHFLEHALGSGLVTDGTMATDQRKVKMLWALRERITEALSRDGYVYKYDLSLPVERLYDIVTDLRARLGPHAKHVVGYGHLGDGNLHLNVTAEAFSPSLLAALEPHVYEWTAGQQGSVSAEHGVGFRKRDVLGYSKPPGALQLMQQLKALLDPKGILNPYKTLPSQA

SEQ ID NO: 1268 - protein, 968 aa, Homo Sapiens
MDSTLTASEIRQRFIDFFKRNEHTYVHSSATIPLDDPTLLFANAGMNQFKPIFLNTIDPSHPMAKLSRAANTQKCIRAGGKHNDLDDVGKDVYHHTFFEMLGSWSFGDYFKELACKMALELLTQEFGIPIERLYVTYFGGDEAAGLEADLECKQIWQNLGLDDTKILPGNMKDNFWEMGDTGPCGPCSEIHYDRIGGRDAAHLVNQDDPNVLEIWNLVFIQYNREADGILKPLPKKSIDTGMGLERLVSVLQNKMSNYDTDLFVPYFEAIQKGTGARPYTGKVGAEDADGIDMAYRVLADHARTITVALADGGRPDNTGRGYVLRRILRRAVRYAHEKLNASRGFFATLVDVVVQSLGDAFPELKKDPDMVKDIINEEEVQFLKTLSRGRRILDRKIQSLGDSKTIPGDTAWLLYDTYGFPVDLTGLIAEEKGLVVDMDGFEEERKLAQLKSQGKGAGGEDLIMLDIYAIEELRARGLEVTDDSPKYNYHLDSSGSYVFENTVATVMALRREKMFVEEVSTGQECGVVLDKTCFYAEQGGQIYDEGYLVKVDDSSEDKTEFTVKNAQVRGGYVLHIGTIYGDLKVGDQVWLFIDEPRRRPIMSNHTATHILNFALRSVLGEADQKGSLVAPDRLRFDFTAKGAMSTQQIKKAEEIANEMIEAAKAVYTQDCPLAAAKAIQGLRAVFDETYPDPVRVVSIGVPVSELLDDPSGPAGSLTSVEFCGGTHLRNSSHAGAFVIVTEEAIAKGIRRIVAVTGAEAQKALRKAESLKKCLSVMEAKVKAQTAPNKDVQREIADLGEALATAVIPQWQKDELRETLKSLKKVMDDLDRASKADVQKRVLEKTKQFIDSNPNQPLVILEMESGASAKALNEALKLFKMHSPQTSAMLFTVDNEAGKITCLCQVPQNAANRGLKASEWVQQVSGLMDGKGGGKDVSAQATGKNVGCLQEALQLATSFAQLRLGDVKN

SEQ ID NO: 1269 - protein, 407 aa, Homo Sapiens
MSGGSADYNREHGGPEGMDPDGVIESNWNEIVDNFDDMNLKESLLRGIYAYGFEKPSAIQQRAIIPCIKGYDVIAQAQSGTGKTATFAISILQQLEIEFKETQALVLAPTRELAQQIQKVILALGDYMGATCHACIGGTNVRNEMQKLQAEAPHIVVGTPGRVFDMLNRRYLSPKWIKMFVLDEADEMLSRGFKDQIYEIFQKLNTSIQVVLLSATMPTDVLEVTKKFMRDPIRILVKKEELTLEGIKQFYINVEREEWKLDTLCDLYETLTITQAVIFLNTRRKVDWLTEKMHARDFTVSALHGDMDQKERDVIMREFRSGSSRVLITTDLLARGIDVQQVSLVINYDLPTNRENYIHRIGRGGRFGRKGVAINFVTEEDKRILRDIETFYNTTVEEMPMNVADLI

SEQ ID NO: 1270 - protein, 763 aa, Homo Sapiens
MVACRAIGILSRFSAFRILRSRGYICRNFTGSSALLTRTHINYGVKGDVAVVRINSPNSKVNTLSKELHSEFSEVMNEIWASDQIRSAVLISSKPGCFIAGADINMLAACKTLQEVTQLSQEAQRIVEKLEKSTKPIVAAINGSCLGGGLEVAISCQYRIATKDRKTVLGTPEVLLGALPGAGGTQRLPKMVGVPAALDMMLTGRSIRADRAKKMGLVDQLVEPLGPGLKPPEERTIEYLEEVAITFAKGLADKKISPKRDKGLVEKLTAYAMTIPFVRQQVYKKVEEKVRKQTKGLYPAPLKIIDVVKTGIEQGSDAGYLCESQKFGELVMTKESKALMGLYHGQVLCKKNKFGAPQKDVKHLAILGAGLMGAGIAQVSVDKGLKTILKDATLTALDRGQQQVFKGLNDKVKKKALTSFERDSIFSNLTGQLDYQGFEKADMVIEAVFEDLSLKHRVLKEVEAVIPDHCIFASNTSALPISEIAAVSKRPEKVIGMHYFSPVDKMQLLEIITTEKTSKDTSASAVAVGLKQGKVIIVVKDGPGFYTTRCLAPMMSEVIRILQEGVDPKKLDSLTTSFGFPVGAATLVDEVGVDVAKHVAEDLGKVFGERFGGGNPELLTQMVSKGFLGRKSGKGFYIYQEGVKRKDLNSDMDSILASLKLPPKSEVSSDEDIQFRLVTRFVNEAVMCLQEGILATPAEGDIGAVFGLGFPPCLGGPFRFVDLYGAQKIVDRLKKYEAAYGKQFTPCQLLADHANSPNKKFYQ

SEQ ID NO: 1271 - protein, 509 aa, Homo Sapiens
MAERAALEELVKLQGERVRGLKQQKASAELIEEEVAKLLKLKAQLGPDESKQKFVLKTPKGTRDYSPRQMAVREKVFDVIIRCFKRHGAEVIDTPVFELKETLMGKYGEDSKLIYDLKDQGGELLSLRYDLTVPFARYLAMNKLTNIKRYHIAKVYRRDNPAMTRGRYREFYQCDFDIAGNFDPMIPDAECLKIMCEILSSLQIGDFLVKVNDRRILDGMFAICGVSDSKFRTICSSVDKLDKVSWEEVKNEMVGEKGLAPEVADRIGDYVQQHGGVSLVEQLLQDPKLSQNKQALEGLGDLKLLFEYLTLFGIDDKISFDLSLARGLDYYTGVIYEAVLLQTPAQAGEEPLGVGSVAAGGRYDGLVGMFDPKGRKVPCVGLSIGVERIFSIVEQRLEALEEKIRTTETQVLVASAQKKLLEERLKLVSELWDAGIKAELLYKKNPKLLNQLQYCEEAGIPLVAIIGEQELKDGVIKLRSVTSREEVDVRREDLVEEIKRRTGQPLCIC

SEQ ID NO: 1272 - protein, 156 aa, Homo Sapiens [sequence omitted]

SEQ ID NO: 1273 - protein, 140 aa, Homo Sapiens [sequence omitted]

SEQ ID NO: 1274 - protein, 938 aa, Homo Sapiens
MNWNKGGPGTKRGFGFGGFAISAGKKEEPKLPQQSHSAFGATSSSSGFGKSAPPQLPSFYKIGSKRANFDEENAYFEDEEEDSSNVDLPYIPAENSPTRQQFHSKPVDSDSDDDPLEAFMAEVEDQAARDMKRLEEKDKERKNVKGIRDDIEEEDDQEAYFRYMAENPTAGVVQEEEEDNLEYDSDGNPIAPTKKIIDPLPPIDHSEIDYPPFEKNFYNEHEEITNLTPQQLIDLRHKLNLRVSGAAPPRPGSSFAHFGFDEQLMHQIRKSEYTQPTPIQCQGVPVALSGRDMIGIAKTGSGKTAAFIWPMLIHIMDQKELEPGDGPIAVIVCPTRELCQQIHAECKRFGKAYNLRSVAVYGGGSMWEQAKALQEGAEIVVCTPGRLIDHVKKKATNLQRVSYLVFDEADRMFDMGFEYQVRSIASHVRPDRQTLLFSATFRKKIEKLARDILIDPIRVVQGDIGEANEDVTQIVEILHSGPSKWNWLTRRLVEFTSSGSVLLFVTKKANAEELANNLKQEGHNLGLLHGDMDQSERNKVISDFKKKDIPVLVATDVAARGLDIPSIKTVINYDVARDIDTHTHRIGRTGRAGEKGVAYTLLTPKDSNFAGDLVRNLEGANQHVSKELLDLAMQNAWFRKSRFKGGKGKKLNIGGGGLGYRERPGLGSENMDRGNNNVMSNYEAYKPSTGAMGDRLTAMKAAFQSQYKSHFVAASLSNQKAGSSAAGASGWTSAGSLNSVPTNSAQQGHNSPDSPVTSAAKGIPGFGNTGNISGAPVTYPSAGAQGVNNTASGNNSREGTGGSNGKRERYTENRGSSRHSHGETGNRHSDSPRHGDGGRHGDGYRHPESSSRHTDGHRHGENRHGGSAGRHGENRGANDGRNGESRKEAFNRESKMEPKMEPKVDSSKMDKVDSKTDKTADGFAVPEPPKRKKSRWDS

SEQ ID NO: 1275 - protein, 1019 aa, Homo Sapiens
MLWRVLLSKRPPFPHPELDFQEAPIPSCPGRLPGRKNSVALAAAPRKEPTGDREKPLPFPVLAPFSNPEHSAPAKVVRAAVPKQRKGSKVGDFGDAINWPTPGEIAHKSVQPQSHKPQPTRKLPPKKDMKEQEKGEGSDSKESPKTKSDESGEEKNGDEDCQRGGQKKKGNKHKWVPLQIDMKPEVPREKLASRPTRPPEPRHIPANRGEIKGSESATYVPVAPPTPAWQPEIKPEPAWHDQDETSSVKSDGAGGARASFRGRGRGRGRGRGRGRGGTRTHFDYQFGYRKFDGVEGPRTPKYMNNITYYFDNVSSTELYSVDQELLKDYIKRQIEYYFSVDNLERDFFLRRKMDADGFLPITLIASFHRVQALTTDISLIFAALKDSKVVEIVDEKVRRREEPEKWPLPPIVDYSQTDFSQLLNCPEFVPRQHYQKETESAPGSPRAVTPVPTKTEEVSNLKTLPKGLSASLPDLDSENWIEVKKRPRPSPARPKKSEESRFSHLTSLPQQLPSQQLMSKDQDEQEELDFLFDEEMEQMDGRKNTFTAWSDEESDYEIDDRDVNKILIVTQTPHYMRRHPGGDRTGNHTSRAKMSAELAKVINDGLFYYEQDLWAEKFEPEYSQIKQEVENFKKVNMISREQFDTLTPEPPVDPNQEVPPGPPRFQQVPTDALANKLFGAPEPSTIARSLPTTVPESPNYRNTRTPRTPRTPQLKDSSQTSRFYPVVKEGRTLDAKMPRKRKTRHSSNPPLESHVGWVMDSREHRPRTASISSSPSEGTPTVGSYGCTPQSLPKFQHPSHELLKENGFTQHVYHKYRRRCLNERKRLGIGQSQEMNTLFRFWSFFLRDHFNKKMYEEFKQLALEDAKEGYRYGLECLFRYYSYGLEKKFRLDIFKDFQEETVKDYEAGQLYGLEKFWAFLKYSKAKNLDIDPKLQEYLGKFRRLEDFRVDPPMGEEGNHKRHSVVAGGGGGEGRKRCPSQSSSRPAAMISQPPTPPTGQPVREDAKWTSQHSNTQTLGK

SEQ ID NO: 1276 - protein, 222 aa, Homo Sapiens
MNSNVENLPPHIIRLVYKEVTTLTADPPDGIKVFPNEEDLTDLQVTIEGPEGTPYAGGLFRMKLLLGKDFPASPPKGYFLTKIFHPNVGANGEICVNVLKRDWTAELGIRHVLLTIKCLLIHPNPESALNEEAGRLLLENYEEYAARARLLTEIHGGAGGPSGRAEAGRALASGTEASSTDPGAPGGPGGAEGPMAKKHAGERDKKLAAKKKTDKKRALRRL

SEQ ID NO: 1277 - protein, 2240 aa, Homo Sapiens
MLPCKKRRTTVTESLQHKGNQEENNVDLESAVKPESDQVKDLSSVSLSWDPSHGRVAGFEVQSLQDAGNQLGMEDTSLSSGMLTQNTNVPILEGVDVAISQGITLPSLESFHPLNIHIGKGKLHATGSKRGKKMTLRPGPVTQEDRCDHLTLKEPFSGEPSEEVKEEGGKPQMNSEGEIPSLPSGSQSAKPVSQPRKSTQPDVCASPQEKPLRTLFHQPEEEIEDGGLFIPMEEQDNEESEKRRKKKKGTKRKRDGRGQEGTLAYDLKLDDMLDRTLEDGAKQHNLTAVNVRNILHEVITNEHVVAMMKAAISETEDMPMFEPKMTRSKLKEVVEKGVVIPTWNISPIKKANEIKPPQFVDIHLEEDDSSDEEYQPDDEEEDETAEESLLESDVESTASSPRGAKKSRLRQSSEMTETDEESGILSEAEKVTTPAIRHISAEVVPMGPPPPPKPKQTRDSTFMEKLHAVDEELASSPVCMDSFQPMDDSLIAFRTRSKMPLKDVPLGQLEAELQAPDITPDMYDPNTADDEDWKMWLGGLMNDDVGNEDEADDDDDPEYNFLEDLDEPDTEDFRTDRAVRITKKEVNELMEELFETFQDEMGFSNMEDDGPEEEECVAEPRPNFNTPQALRFEEPLANLLNEQHRTVKELFEQLKMKKSSAKQLQEVEKVKPQSEKVHQTLILDPAQRKRLQQQMQQHVQLLTQIHLLATCNPNLNPEATTTRIFLKELGTFAQSSIALHHQYNPKFQTLFQPCNLMGAMQLIEDFSTHVSIDCSPHKTVKKTANEFPCLPKQVAWILATSKVFMYPELLPVCSLKAKNPQDKIVFTKAEDNLLALGLKHFEGTEFPNPLISKYLLTCKTAHQLTVRIKNLNMNRAPDNIIKFYKKTKQLPVLGKCCEEIQPHQWKPPIEREEHRLPFWLKASLPSIQEELRHMADGAREVGNMTGTTEINSDRSLEKDNLELGSESRYPLLLPKGVVLKLKPVATRFPRKAWRQKRSSVLKPLLIQPSPSLQPSFNPGKTPARSTHSEAPPSKMVLRIPHPIQPATVLQTVPGVPPLGVSGGESFESPAALPAVPPEARTSFPLSESQTLLSSAPVPKVMLPSLAPSKFRKPYVRRRPSKRRGVKASPCMKPAPVIHHPASVIFTVPATTVKIVSLGGGCNMIQPVNAAVAQSPQTIPITTLLVNPTSFPCPLNQSLVASSVSPLIVSGNSVNLPIPSTPEDKAHVNVDIACAVADGENAFQGLEPKLEPQELSPLSATVFPKVEHSPGPPLADAECQEGLSENSACRWTVVKTEEGRQALEPLPQGIQESLNNPTPGDLEEIVKMEPEEAREEISGSPERDICDDIKVEHAVELDTGAPSEELSSAGEVTKQTVLQKEEERSQPTKTPSSSQEPPDEGTSGTDVNKGSSKNALSSMDPEVRLSSPPGKPEDSSSVDGQSVGTPVGPETGGEKNGPEEEEEEDFDDLTQDEEDEMSSASEESVLSVPELQETMEKLTWLASERRMSQEGESEEENSQEENSEPEEEEEEEAEGMESLQKEDEMTDEAVGDSAEKPPTFASPETAPEVETSRTPPGESIKAAGKGRNNHRARNKRGSRARASKDTSKLLLLYDEDILERDPLREQKDLAFAQAYLTRVREALQHIPGKYEDFLQVIYEFESSTQRRTAVDLYKSLQILLQDWPQLLKDFAAFLLPEQALACGLFEEQQAFEKSRKFLRQLEICFAENPSHHQKIIKVLQGCADCLPQEITELKTQMWQLLKGHDHLQDEFSIFFDHLRPAASRMGDFEEINWTEEKEYEFDGFEEVALPDVEEEEEPPKIPTASKNKRKKEIGVQNHDKETEWPDGAKDCACSCHEGGPDSKLKKSKRRSCSHCSSKVCDSKSYKSKEPHELVGSSPHREASPMPGAKEAGQGKDMMEEEAPEERESTEATQSRTVRTTRKGEMPVSGLAVGSTLPSPREVTVTERLLLDGPPPHSPETPQFPPTTGAVLYTVKRNQVGPEVRSCPKASPRLQKEREGQKAVSESEALMLVWDASETEKLPGTVEPPASFLSPVSSKTRDAGRRHVSGKPDTQERWLPSSRARVKTRDRTCPVHESPSGIDTSETSPKAPRGGLAKDSGTQAKGPEGEQQPKAAEATVCANNSKVSSTGEKVVLWTREADRVILTMCQEQGAQPQTFNIISQQLGNKTPAEVSHRFRELMQLFHTACEASSEDEDDATSTSNADQLSDHGDLLSEEELDE

SEQ ID NO: 1278 - protein, 83 aa, Homo Sapiens
MSGPNGDLGMPVEAGAEGEEDGFGEAEYAAINSMLDQINSCLDHLEEKNDHLHARLQELLESNRQTRLEFQQQLGEAPSDASP

SEQ ID NO: 1279 - protein, 289 aa, Homo Sapiens
MAGAGRGAAVSRVQAGPGSPRRARGRQQVQPLGKQRPAPWPGLRSKEKKKVNCKPKNQDEQEIPFRLREIMRSRQEMKNPISNKKRKKAAQVTFRKTLEKEAKGEEPDIAVPKFKQRKGESDGAYIHRMQQEAQHVLFLSKNQAIRQPEVQAAPKEKSEQKKAKKAFQKRRLDKVRRKKEEKAADRLEQELLRDTVKFGEVVLQPPELTARPQRSVSKDQPGRRSQMLRMLLSPGGVSQPLTASLARQRIVEEERERAVQAYRALKQRQQQLHGERPHLTSRKKPEPQL

SEQ ID NO: 1280 - protein, 465 aa, Homo Sapiens
MFRQEQPLAEGSFAPMGSLQPDAGNASWNGTEAPGGGARATPYSLQVTLTLVCLAGLLMLLTVFGNVLVIIAVFTSRALKAPQNLFLVSLASADILVATLVIPFSLANEVMGYWYFGKAWCEIYLALDVLFCTSSIVHLCAISLDRYWSITQAIEYNLKRTPRRIKAIIITVWVISAVISFPPLISIEKKGGGGGPQPAEPRCEINDQKWYVISSCIGSFFAPCLIMILVYVRIYQIAKRRTRVPPSRRGPDAVAAPPGGTERRPNGLGPERSAGPGGAEAEPLPTQLNGAPGEPAPAGPRDTDALDLEESSSSDHAERPPGPRRPERGPRGKGKARASQVKPGDSLPRRGPGATGIGTPAAGPGEERVGAAKASRWRGRQNREKRFTFVLAVVIGVFVVCWFPFFFTYTLTAVGCSVPRTLFKFFFWFGYCNSSLNPVIYTIFNHDFRRAFKKILCRGDRKRIV

SEQ ID NO: 1281 - protein, 180 aa, Homo Sapiens
MAPGVARGPTPYWRLRLGGAALLLLLIPVAAAQEPPGAACSQNTNKTCEECLKNVSCLWCNTNKACLDYPVTSVLPPASLCKLSSARWGVCWVNFEALIITMSVVGGTLLLGIAICCCCCCRRKRSRKPDRSEEKAMREREERRIRQEERRAEMKTRHDEIRKKYGLFKEENPYARFENN

SEQ ID NO: 1282 - protein, 253 aa, Homo Sapiens
MGEFNEKKTTCGTVCLKYLLFTYNCCFWLAGLAVMAVGIWTLALKSDYISLLASGTYLATAYILVVAGTVVMVTGVLGCCATFKERRNLLRLYFILLLIIFLLEIIAGILAYAYYQQLNTELKENLKDTMTKRYHQPGHEAVTSAVDQLQQEFHCCGSNNSQDWRDSEWIRSQEAGGRVVPDSCCKTVVALCGQRDHASNIYKVEGGCITKLETFIQEHLRVIGAVGIGIACVQVFGMIFTCCLYRSLKLEHY

SEQ ID NO: 1283 - protein, 329 aa, Homo Sapiens
MTHFNKGPSYGLSAEVKNKIASKYDHQAEEDLRNWIEEVTGMSIGPNFQLGLKDGIILCELINKLQPGSVKKVNESSLNWPQLENIGNFIKAIQAYGMKPHDIFEANDLFENGNMTQVQTTLVALAGLAKTKGFHTTIDIGVKYAEKQTRRFDEGKLKAGQSVIGLQMGTNKCASQAGMTAYGTRRHLYDPKMQTDKPFDQTTISLQMGTNKGASQAGMLAPGTRRDIYDQKLTLQPVDNSTISLQMGTNKVASQKGMSVYGLGRQVYDPKYCAAPTEPVIHNGSQGTGTNGSEISDSDYQAEYPDEYHGEYQDDYPRDYQYSDQGIDY

SEQ ID NO: 1284 - protein, 404 aa, Homo Sapiens
MAMVTGGWGGPGGDTNGVDKAGGYPRAAEDDSASPPGAASDAEPGDEERPGLQVDCVVCGDKSSGKHYGVFTCEGCKSFFKRSIRRNLSYTCRSNRDCQIDQHHRNQCQYCRLKKCFRVGMRKEAVQRGRIPHSLPGAVAASSGSPPGSALAAVASGGDLFPGQPVSELIAQLLRAEPYPAAAGRFGAGGGAAGAVLGIDNVCELAARLLFSTVEWARHAPFFPELPVADQVALLRLSWSELFVLNAAQAALPLHTAPLLAAAGLHAAPMAAERAVAFMDQVRAFQEQVDKLGRLQVDSAEYGCLKAIALFTPDACGLSDPAHVESLQEKAQVALTEYVRAQYPSQPQRFGRLLLRLPALRAVPASLISQLFFMRLVGKTPIETLIRDMLLSGSTFNWPYGSGQ

SEQ ID NO: 1285 - protein, 192 aa, Homo Sapiens
MQAIKCVVVGDGAVGKTCLLISYTTNAFPGEYIPTVFDNYSANVMVDGKPVNLGLWDTAGQEDYDRLRPLSYPQTDVFLICFSLVSPASFENVRAKWYPEVRHHCPNTPIILVGTKLDLRDDKDTIEKLKEKKLTPITYPQGLAMAKEIGAVKYLECSALTQRGLKTVFDEAIRAVLCPPPVKKRKRKCLLL

SEQ ID NO: 1286 - protein, 152 aa, Homo Sapiens
MAGLPRRIIKETQRLLAEPVPGIKAEPDESNARYFHVVIAGPQDSPFEGGTFKLELFLPEEYPMAAPKVRFMTKIYHPNVDKLGRICLDILKDKWSPALQIRTVLLSIQALLSAPNPDDPLANDVAEQWKTNEAQAIETARAWTRLYAMNNI

SEQ ID NO: 1287 - protein, 540 aa, Homo Sapiens
MDSVAFEDVDVNFTQEEWALLDPSQKNLYRDVMWETMRNLASIGKKWKDQNIKDHYKHRGRNLRSHMLERLYQTKDGSQRGGIFSQFANQNLSKKIPGVKLCESIVYGEVSMGQSSLNRHIKDHSGHEPKEYQEYGEKPDTRNQCWKPFSSHHSFRTHEIIHTGEKLYDCKECGKTFFSLKRIRRHIITHSGYTPYKCKVCGKAFDYPSRFRTHERSHTGEKPYECQECGKAFTCITSVRRHMIKHTGDGPYKCKVCGKPFHSLSSFQVHERIHTGEKPFKCKQCGKAFSCSPTLRIHERTHTGEKPYECKQCGKAFSYLPSLRLHERIHTGEKPFVCKQCGKAFRSASTFQIHERTHTGEKPYECKECGEAFSCIPSMRRHMIKHTGEGPYKCKVCGKPFHSLSPFRIHERTHTGEKPYVCKHCGKAFVSSTSIRIHERTHTGEKPYECKQCGKAFSYLNSFRTHEMIHTGEKPFECKRCGKAFRSSSSFRLHERTHTGQKPYHCKECGKAYSCRASFQRHMLTHAEDGPPYKCMWESL

SEQ ID NO: 1288 - protein, 506 aa, Homo Sapiens
MAWNSPSRRPVWQGGAPREDGGARGVWLPSSGQVSAQRTGRRLVGLEPTPTGSLTPRPPRPVPGMPRARKGNTLRKGGQRRGGGARSSAQADSGSSDDEAASEARSTASECPSLLSTTAEDSLGGDVVDEQGQQEDLEEKLKEYVDCLTDKSAKTRQGALESLRLALASRLLPDFLLERRLTLADALEKCLKKGKGEEQALAAAVLGLLCVQLGPGPKGEELFHSLQPLLVSVLSDSTASPAARLHCASALGLGCYVAAADIQDLVSCLACLESVFSRFYGLGGSSTSPVVPASLHGLLSAALQAWALLLTICPSTQISHILDRQLPRLPQLLSSESVNLRIAAGETIALLFELARDLEEEFVYEDMEALCSVLRTLATDSNKYRAKADRRRQRSTFRAVLHSVEGGECEEEIVRFGFEVLYMDSWARHRIYAAFKEVLGSGMHHHLQNNELLRDIFGLGPVLLLDATALKACKVPRFEKHLYNAAAFKARTKARSRVRDKRADIL

SEQ ID NO: 1289 - protein, 323 aa, Homo Sapiens
MAAELSMGPELPTSPLAMEYVNDFDLLKFDVKKEPLGRAERPGRPCTRLQPAGSVSSTPLSTPCSSVPSSPSFSPTEQKTHLEDLYWMASNYQQMNPEALNLTPEDAVEALIGSHPVPQPLQSFDSFRGAHHHHHHHHPHPHHAYPGAGVAHDELGPHAHPHHHHHHQASPPPSSAASPAQQLPTSHPGPGPHATASATAAGGNGSVEDRFSDDQLVSMSVRELNRHLRGFTKDEVIRLKQKRRTLKNRGYAQSCRYKRVQQKHHLENEKTQLIQQVEQLKQEVSRLARERDAYKVKCEKLANSGFREAGSTSDSPSSPEFFL

SEQ ID NO: 1290 - protein, 504 aa, Homo Sapiens
MGAGGPRRGEGPPDGGWGWVVLGACFVVTGFAYGFPKAVSVFFRALMRDFDAGYSDTAWVSSIMLAMLYGTGPVSSILVTRFGCRPVMLAGGLLASAGMILASFATRLLELYLTAGVLTGLGLALNFQPSLIMLGLYFERRRPLANGLAAAGSPVFLSALSPLGQQLLERFGWRGGFLLLGGLLLHCCACGAVMRPPPGPGPRPRRDSAGDRAGDAPGEAEADGAGLQLREASPRVRPRRRLLDLAVCTDRAFAVYAVTKFLMALGLFVPAILLVNYAKDAGVPDTDAAFLLSIVGFVDIVARPACGALAGLARLRPHVPYLFSLALLANGLTDLSSARARSYGALVAFCVAFGLSYGMVGALQFEVLMAAVGAPRFPSALGLVLLVEAAAVLIGPPSAGRLVDVLKNYEIIFYLAGSEVALAGVFMAVATNCCLRCAKAAPSGPGTEGGASDTEDAEAEGDSEPLPVVAEEPGNLEALEVLSARGEPTEPEIEARPRLAAESV

SEQ ID NO: 1291 - protein, 547 aa, Homo Sapiens
MTKTDPAPMAPPPRGEEEEEEEEDEPVPEAPSPTQERRQKPVVHPSAPAPLPKDYAFTFFDPNDPACQEILFDPQTTIPELFAIVRQWVPQVQHKIDVIGNEILRRGCHVNDRDGLTDMTLLHYACKAGAHGVGDPAAAVRLSQQLLALGADVTLRSRWTNMNALHYAAYFDVPDLVRVLLKGARPRVVNSTCSDFNHGSALHIAASSLCLGAAKCLLEHGANPALRNRKGQVPAEVVPDPMDMSLDKAEAALVAKELRTLLEEAVPLSCALPKVTLPNYDNVPGNLMLSALGLRLGDRVLLDGQKTGTLRFCGTTEFASGQWVGVELDEPEGKNDGSVGGVRYFICPPKQGLFASVSKISKAVDAPPSSVTSTPRTPRMDFSRVTGKGRREHKGKKKTPSSPSLGSLQQRDGAKAEVGDQVLVAGQKQGIVRFYGKTDFAPGYWYGIELDQPTGKHDGSVFGVRYFTCPPRHGVFAPASRIQRIGGSTDSPGDSVGAKKVHQVTMTQPKRTFTTVRTPKDIASENSISRLLFCCWFPWMLRAEMQS

SEQ ID NO: 1292 - protein, 515 aa, Homo Sapiens
MGLLAFRDVALEFSPEEWECLDPAQRSLYRDVMLENYRNLISLGEDSFNMQFLFHSLAMSKPELIICLEARKEPWNVNTEKTAKHSVLSSYLTEDILPEQGLQVSFQKVMLRRYERCCLEKLRLRNDWEIVGEWKGQKASYNGLDLCSATTHSKNFQCNKCVKGFSKFANLNKCKISHTGEKPFKCKECGNVSCMSLIMTQQQRIHIGENPYQCKKCGKAFNECSCFTDCKRIHVGEKHCKCEECNNIFKSCSSLAVVEKNHTEKKTYRCEECGKAFNLCSVLTKHKKIHTGEKPYKCEECGKSFKLFPYLTQHKRIHSREKPYKCEECGKVFKLLSYLTQHRRIHTGEKTFRCEECGKAFNQSSHLTEHRRIHTGEKPYKCEECGKAFTWFSYLIQHKRIHTGQKPYKCEECGKAFTWFSYLTQHKRIHTGEKPYKCDECGKAFNWFSYLTNHKRIHTGEKPYKCEECGKAFGQSSHLSKHKTIHTREKPYKCEECGKAFNHSAQLAVHEKTHT

SEQ ID NO: 1293 - protein, 1035 aa, Homo Sapiens
MAAETLNFGPEWLRALSGGGSVASPPPSPAMPKYKLADYRYGREEMLALYVKENKVPEELQDKEFAAVLQDEPLQPLALEPLTEEEQRNFSLSVNSVAVLRLMGKGAGPPLAGTSRGRGSTRSRGRGRGDSCFYQRSIEEGDGAFGRSPREIQRSQSWDDRGERRFEKSARRDGARCGFEEGGAGPRKEHARSDSENWRSLREEQEEEEEGSWRLGAGPRRDGDRWRSASPDGGPRSAGWREHGERRRKFEFDLRGDRGGCGEEEGRGGGGSSHLRRCRAPEGFEEDKDGLPEWCLDDEDEEMGTFDASGAFLPLKKGPKEPIPEEQELDFQGLEEEEEPSEGLEEEGPEAGGKELTPLPPQEEKSSSPSPLPTLGPLWGTNGDGDETAEKEPPAAEDDIRGIQLSPGVGSSAGPPGDLEDDEGLKHLQQEAEKLVASLQDSSLEEEQFTAAMQTQGLRHSAAATALPLSHGAARKWFYKDPQGEIQGPFTTQEMAEWFQAGYFSMSLLVKRGCDEGFQPLGEVIKMWGRVPFAPGPSPPPLLGNMDQERLKKQQELAAAALYQQLQHQQFLQLVSSRQLPQCALREKAALGDLTPPPPPPPQQQQQQLTAFLQQLQALKPPRGGDQNLLPTMSRSLSVPDSGRLWDVHTSASSQSGGEASLWDIPINSSTQGPILEQLQLQHKFQERREVELRAKREEEERKRREEKRRQQQQEEQKRRQEEEELFRRKHVRQQELLLKLLQQQQAVPVPPAPSSPPPLWAGLAKQGLSMKTLLELQLEGERQLHKQPPPREPARAQAPNHRVQLGGLGTAPLNQWVSEAGPLWGGPDKSGGGSSGLGLWEDTPKSGGSLVRGLGLKNSRSSPSLSDSYSHLSGRPIRKKTEEEEKLLKLLQGIPRPQDGFTQWCEQMLHTLSATGSLDVPMAVAILKEVESPYDVHDYIRSCLGDTLEAKEFAKQFLERRAKQKASQQRQQQQEAWLSSASLQTAFQANHSTKLGPGEGSKAKRRALMLHSDPSILGYSLHGSSGEIESVDDY

SEQ ID NO: 1294 - protein, 686 aa, Homo Sapiens
MGEFKVHRVRFFNYVPSGIRCVAYNNQSNRLAVSRTDGTVEIYNLSANYFQEKFFPGHESRATEALCWAEGQRLFSAGLNGEIMEYDLQALNIKYAMDAFGGPIWSMAASPSGSQLLVGCEDGSVKLFQITPDKIQFERNFDRQKSRILSLSWHPSGTHIAAGSIDYISVFDVKSGSAVHKMIVDRQYMGVSKRKCIVWGVAFLSDGTIISVDSAGKVQFWDSATGTLVKSHLIANADVQSIAVADQEDSFVVGTAEGTVFHFQLVPVTSNSSEKQWVRTKPFQHHTHDVRTVAHSPTALISGGTDTHLVFRPLMEKVEVKNYDAALRKITFPHRCLISCSKKRQLLLFQFAHHLELWRLGSTVATGKNGDTLPLSKNADHLLHLKTKGPENIICSCISPCGSWIAYSTVSRFFLYRLNYEHDNISLKRVSKMPAFLRSALQILFSEDSTKLFVASNQGALHIVQLSGGSFKHLHAFQPQSGTVEAMCLLAVSPDGNWLAASGTSAGVHVYNVKQLKLHCTVPAYNFPVTAMAIAPNTNNLVIAHSDQQVFEYSIPDKQYTDWSRTVQKQGFHHLWLQRDTPITHISFHPKRPMHILLHDAYMFCIIDKSLPLPNDKTLLYNPFPPTNESDVIRRRTAHAFKISKIYKPLLFMDLLDERTLVAVERPLDDIIAQLPPPIKKKKFGT

SEQ ID NO: 1295 - protein, 480 aa, Homo Sapiens [sequence omitted]

SEQ ID NO: 1296 - protein, 298 aa, Homo Sapiens
MVRMVPVLLSLLLLLGPAVPQENQDGRYSLTYIYTGLSKHVEDVPAFQALGSLNDLQFFRYNSKDRKSQPMGLWRQVEGMEDWKQDSQLQKAREDIFMETLKDIVEYYNDSNGSHVLQGRFGCEIENNRSSGAFWKYYYDGKDYIEFNKEIPAWVPFDPAAQITKQKWEAEPVYVQRAKAYLEEECPATLRKYLKYSKNILDRQDPPSVVVTSHQAPGEKKKLKCLAYDFYPGKIDVHWTRAGEVQEPELRGDVLHNGNGTYQSWVVVAVPPQDTAPYSCHVQHSSLAQPLVVPWEAS

SEQ ID NO: 1297 - protein, 338 aa, Homo Sapiens
MLSALARPASAALRRSFSTSAQNNAKVAVLGASGGIGQPLSLLLKNSPLVSRLTLYDIAHTPGVAADLSHIETKAAVKGYLGPEQLPDCLKGCDVVVIPAGVPRKPGMTRDDLFNTNATIVATLTAACAQHCPEAMICVIANPVNSTIPITAEVFKKHGVYNPNKIFGVTTLDIVRANTFVAELKGLDPARVNVPVIGGHAGKTIIPLISQCTPKVDFPQDQLTALTGRIQEAGTEVVKAKAGAGSATLSMAYAGARFVFSLVDAMNGKEGVVECSFVKSQETECTYFSTPLLLGKKGIEKNLGIGKVSSFEEKMISDAIPELKASIKKGEDFVKTLK

SEQ ID NO: 1298 - protein, 280 aa, Homo Sapiens
MAAVVALSLRRRLPATTLGGACLQASRGAQTAAATAPRIKKFAIYRWDPDKAGDKPHMQTYEVDLNKCGPMVLDALIKIKNEVDSTLTFRRSCREGICGSCAMNINGGNTLACTRRIDTNLNKVSKIYPLPHMYVIKDLVPDLSNFYAQYKSIEPYLKKKDESQEGKQQYLQSIEEREKLDGLYECILCACCSTSCPSYWWNGDKYLGPAVLMQAYRWMIDSRDDFTEERLAKLQDPFSLYRCHTIMNCTRTCPKGLNPGKAIAEIKKMMATYKEKKASV

SEQ ID NO: 1299 - protein, 748 aa, Homo Sapiens
MGRAGAAAVIPGLALLWAVGLGSAAPSPPRLRLSFQELQAWHGLQTFSLERTCCYQALLVDEERGRLFVGAENHVASLNLDNISKRAKKLAWPAPVEWREECNWAGKDIGTECMNFVKLLHAYNRTHLLACGTGAFHPTCAFVEVGHRAEEPVLRLDPGRIEDGKGKSPYDPRHRAASVLVGEELYSGVAADLMGRDFTIFRSLGQRPSLRTEPHDSRWLNEPKFVKVFWIPESENPDDDKIYFFFRETAVEAAPALGRLSVSRVGQICRNDVGGQRSLVNKWTTFLKARLVCSVPGVEGDTHFDQLQDVFLLSSRDHRTPLLYAVFSTSSIFQGSAVCVYSMNDVRRAFLGPFAHKEGPMHQWVSYQGRVPYPRPGMCPSKTFGTFSSTKDFPDDVIQFARNHPLMYNSVLPTGGRPLFLQVGANYTFTQIAADRVAAADGHYDVLFIGTDVGTVLKVISVPKGSRPSAEGLLLEELHVFEDSAAVTSMQISSKRHQLYVASRSAVAQIALHRCAAHGRVCTECCLARDPYCAWDGVACTRFQPSAKRRFRRQDVRNGDPSTLCSGDSSRPALLEHKVFGVEGSSAFLECEPRSLQARVEWTFQRAGVTAHTQVLAEERTERTARGLLLRRLRRRDSGVYLCAAVEQGFTQPLRRLSLHVLSATQAERLARAEEAAPAAPPGPKLWYRDFLQLVEPGGGGSANSLRMCRPQPALQSLPLESRRKGRNRRTHAPEPRAERGPRSATHW

SEQ ID NO: 1300 - protein, 565 aa, Homo Sapiens
MSGRSKRESRGSTRGKRESESRGSSGRVKRERDREREPEAASSRGSPVRVKREFEPASAREAPASVVPFVRVKREREVDEDSEPEREVRAKNGRVDSEDRRSRHCPYLDTINRSVLDFDFEKLCSISLSHINAYACLVCGKYFQGRGLKSHAYIHSVQFSHHVFLNLHTLKFYCLPDNYEIIDSSLEDITYVLKPTFTKQQIANLDKQAKLSRAYDGTTYLPGIVGLNNIKANDYANAVLQALSNVPPLRNYFLEEDNYKNIKRPPGDIMFLLVQRFGELMRKLWNPRNFKAHVSPHEMLQAVVLCSKKTFQITKQGDGVDFLSWFLNALHSALGGTKKKKKTIVTDVFQGSMRIFTKKLPHPDLPAEEKEQLLHNDEYQETMVESTFMYLTLDLPTAPLYKDEKEQLIIPQVPLFNILAKFNGITEKEYKTYKENFLKRFQLTKLPPYLIFCIKRFTKNNFFVEKNPTIVNFPITNVDLREYLSEEVQAVHKNTTYDLIANIVHDGKPSEGSYRIHVLHHGTGKWYELQDLQVTDILPQMITLSEAYIQIWKRRDNDETNQQGA

SEQ ID NO: 1301 - protein, 327 aa, Homo Sapiens
MAAAAAAAAATNGTGGSSGMEVDAAVVPSVMACGVTGSVSVALHPLVILNISDHWIRMRSQEGRPVQVIGALIGKQEGRNIEVMNSFELLSHTVEEKIIIDKEYYYTKEEQFKQVFKELEFLGWYTTGGPPDPSDIHVHKQVCEIIESPLFLKLNPMTKHTDLPVSVFESVIDIINGEATMLFAELTYTLATEEAERIGVDHVARMTATGSGENSTVAEHLIAQHSAIKMLHSRVKLILEYVKASEAGEVPFNHEILREAYALCHCLPVLSTDKFKTDFYDQCNDVGLMAYLGTITKTCNTMNQFVNKFNVLYDRQGIGRRMRGLFF

SEQ ID NO: 1302 - protein, 644 aa, Homo Sapiens
MEAERGPERRPAERSSPGQTPEEGAQALAEFAALHGPALRASGVPERYWGRLLHKLEHEVFDAGEVFGIMQVEEVEEEEDEAAREVRKQQPNPGNELCYKVIVTRESGLQAAHPNSIFLIDHAWTCRVEHARQQLQQVPGLLHRMANLMGIEFHGELPSTEAVALVLEEMWKFNQTYQLAHGTAEEKMPVWYIMDEFGSRIQHADVPSFATAPFFYMPQQVAYTLLWPLRDLDTGEEVTRDFAYGETDPLIRKCMLLPWAPTDMLDLSSCTPEPPAEHYQAILEENKEKLPLDINPVVHPHGHIFKVYTDVQQVASSLTHPRFTLTQSEADADILFNFSHFKDYRKLSQERPGVLLNQFPCENLLTVKDCLASIARRAGGPEGPPWLPRTFNLRTELPQFVSYFQQRERWGEDNHWICKPWNLARSLDTHVTKSLHSIIRHRESTPKVVSKYIESPVLFLREDVGKVKFDIRYIVLLRSVRPLRLFVYDVFWLRFSNRAFALNDLDDYEKHFTVMNYDPDVVLKQVHCEEFIPEFEKQYPEFPWTDVQAEIFRAFTELFQVACAKPPPLGLCDYPSSRAMYAVDLMLKWDNGPDGRRVMQPQILEVNFNPDCERACRYHPTFFNDVFSTLFLDQPGGCHVTCLV

SEQ ID NO: 1303 - protein, 77 aa, Homo Sapiens
MSVAFVPDWLRGKAEVNQETIQRLLEENDQLIRCIVEYQNKGRGNECVQYQHVLHRNLIYLATIADASPTSTSKAME

SEQ ID NO: 1304 - protein, 210 aa, Homo Sapiens
MATETVELHKLKLAELKQECLARGLETKGIKQDLIHRLQAYLEEHAEEEANEEDVLGDETEEEETKPIELPVKEEEPPEKTVDVAAEKKVVKITSEIPQTERMQKRAERFNVPVSLESKKAARAARFGISSVPTKGLSSDNKPMVNLDKLKERAQRFGLNVSSISRKSEDDEKLKKRKERFGIVTSSAGTGTTEDTEAKKRKRAERFGIA

SEQ ID NO: 1305 - protein, 117 aa, Homo Sapiens
MTVLEAVLEIQAITGSRLLSMVPGPARPPGSCWDPTQCTRTWLLSHTPRRRWISGLPRASCRLGEEPPPLPYCDQAYGEELSIRHRETWAWLSRTDTAWPGAPGVKQARILGELLLV

SEQ ID NO: 1306 - protein, 262 aa, Homo Sapiens
MAAASAGATRLLLLLLMAVAAPSRARGSGCRAGTGARGAGAEGREGEACGTVGLLLEHSFEIDDSANFRKRGSLLWNQQDGTLSLSQRQLSEEERGRLRDVAALNGLYRVRIPRRPGALDGLEAGGYVSSFVPACSLVESHLSDQLTLHVDVAGNVVGVSVVTHPGGCRGHEVEDVDLELFNTSVQLQPPTTAPGPETAAFIERLEMEQAQKAKNPQEQKSFFAKYWMYIIPVVLFLMMSGAPDTGGQGGGGGGGGGGGSGR

SEQ ID NO: 1307 - protein, 193 aa, Homo Sapiens
MGKQNSKLRPEVLQDLRENTEFTDHELQEWYKGFLKDCPTGHLTVDEFKKIYANFFPYGDASKFAEHVFRTFDTNGDGTIDFREFIIALSVTSRGKLEQKLKWAFSMYDLDGNGYISRSEMLEIVQAIYKMVSSVMKMPEDESTPEKRTDKIFRQMDTNNDGKLSLEEFIRGAKSDPSIVRLLQCDPSSASQF

SEQ ID NO: 1308 - protein, 142 aa, Homo Sapiens
MIAPTDSHEEVRSGTSYILPFASRFLSFRADSAHASMVNVPKTRRTFCKKCGKHQPHKVTQYKKGKDSLYAQGKRRYDRKQSGYGGQTKPIFRKKAKTTKKIVLRLECVEPNCRSKRMLAIKRCKHFELGGDKKRKGQVIQF

SEQ ID NO: 1309 - protein, 310 aa, Homo Sapiens
MRRAALWLWLCALALSLQPALPQIVATNLPPEDQDGSGDDSDNFSGSGAGALQDITLSQQTPSTWKDTQLLTAIPTSPEPTGLEATAASTSTLPAGEGPKEGEAVVLPEVEPGLTAREQEATPRPRETTQLPTTHQASTTTATTAQEPATSHPHRDMQPGHHETSTPAGPSQADLHTPHTEDGGPSATERAAEDGASSQLPAAEGSGEQDFTFETSGENTAVVAVEPDRRNQSPVDQGATGASQGLLDRKEVLGGVIAGGLVGLIFAVCLVGFMLYRMKKKDEGSYSLEEPKQANGGAYQKPTKQEEFYA

SEQ ID NO: 1310 - protein, 346 aa, Homo Sapiens
MDMLDPGLDPAASATAAAAASHDKGPEAEEGVELQEGGDGPGAEEQTAVAITSVQQAAFGDHNIQYQFRTETNGGQVTYRVVQVTDGQLDGQGDTAGAVSVVSTAAFAGGQQAVTQVGVDGAAQRPGPAAASVPPGPAAPFPLAVIQNPFSNGGSPAAEAVSGEARFAYFPASSVGDTTAVSVQTTDQSLQAGGQFYVMMTPQDVLQTGTQRTIAPRTHPYSPKIDGTRTPRDERRRAQHNEVERRRRDKINNWIVQLSKIIPDCNADNSKTGASKGGILSKACDYIRELRQTNQRMQETFKEAERLQMDNELLRQQIEELKNENALLRAQLQQHNLEMVGEGTRQ

SEQ ID NO: 1311 - protein, 478 aa, Homo Sapiens
MAPLRPLLILALLAWVALADQESCKGRCTEGFNVDKKCQCDELCSYYQSCCTDYTAECKPQVTRGDVFTMPEDEYTVYDDGEEKNNATVHEQVGGPSLTSDLQAQSKGNPEQTPVLKPEEEAPAPEVGASKPEGIDSRPETLHPGRPQPPAEEELCSGKPFDAFTDLKNGSLFAFRGQYCYELDEKAVRPGYPKLIRDVWGIEGPIDAAFTRINCQGKTYLFKGSQYWRFEDGVLDPDYPRNISDGFDGIPDNVDAALALPAHSYSGRERVYFFKGKQYWEYQFQHQPSQEECEGSSLSAVFEHFAMMQRDSWEDIFELLFWGRTSAGTRQPQFISRDWHGVPGQVDAAMAGRIYISGMAPRPSLAKKQRFRHRNRKGYRSQRGHSRGRNQNSRRPSRATWLSLFSSEESNLGANNYDDYRMDWLVPATCEPIQSVFFFSGDKYYRVNLRTRRVDTVDPPYPRSIAQYWLGCPAPGHL

SEQ ID NO: 1312 - protein, 647 aa, Homo Sapiens
MAEEEAPKKSRAAGGGASWELCAGALSARLAEEGSGDAGGRRRPPVDPRRLARQLLLLLWLLEAPLLLGVRAQAAGQGPGQGPGPGQQPPPPPQQQQSGQQYNGERGISVPDHGYCQPISIPLCTDIAYNQTIMPNLLGHTNQEDAGLEVHQFYPLVKVQCSAELKFFLCSMYAPVCTVLEQALPPCRSLCERARQGCEALMNKFGFQWPDTLKCEKFPVHGAGELCVGQNTSDKGTPTPSLLPEFWTSNPQHGGGGHRGGFPGGAGASERGKFSCPRALKVPSYLNYHFLGEKDCGAPCEPTKVYGLMYFGPEELRFSRTWIGIWSVLCCASTLFTVLTYLVDMRRFSYPERPIIFLSGCYTAVAVAYIAGFLLEDRVVCNDKFAEDGARTVAQGTKKEGCTILFMMLYFFSMASSIWWVILSLTWFLAAGMKWGHEAIEANSQYFHLAAWAVPAIKTITILALGQVDGDVLSGVCFVGLNNVDALRGFVLAPLFVYLFIGTSFLLAGFVSLFRIRTIMKHDGTKTEKLEKLMVRIGVFSVLYTVPATIVIACYFYEQAFRDQWERSWVAQSCKSYAIPCPHLQAGGGAPPHPPMSPDFTVFMIKYLMTLIVGITSGFWIWSGKTLNSWRKFYTRLTNSKQGETTV

SEQ ID NO: 1313 - protein, 342 aa, Homo Sapiens
MAAVALMPPPLLLLLLLASPPAASAPSARDPFAPQLGDTQNCQLRCRDRDLGPQPSQAGLEGASESPYDRAVLISACERGCRLFSICRFVARSSKPNATQTECEAACVEAYVKEAEQQACSHGCWSQPAEPEPEQKRKVLEAPSGALSLLDLFSTLCNDLVNSAQGFVSSTWTYYLQTDNGKVVVFQTQPIVESLGFQGGRLQRVEVTWRGSHPEALEVHVDPVGPLDKVRKAKIRVKTSSKAKVESEEPQDNDFLSCMSRRSGLPRWILACCLFLSVLVMLWLSCSTLVTAPGQHLKFQPLTLEQHKGFMMEPDWPLYPPPSHACEDSLPPYKLKLDLTKL

SEQ ID NO: 1314 - protein, 354 aa, Homo Sapiens
MATPLVAGPAALRFAAAASWQVVRGRCVEHFPRVLEFLRSLRAVAPGLVRYRHHERLCMGLKAKVVVELILQGRPWAQVLKALNHHFPESGPIVRDPKATKQDLRKILEAQETFYQQVKQLSEAPVDLASKLQELEQEYGEPFLAAMEKLLFEYLCQLEKALPTPQAQQLQDVLSWMQPGVSITSSLAWRQYGVDMGWLLPECSVTDSVNLAEPMEQNPPQQQRLALHNPLPKAKPGTHLPQGPSSRTHPEPLAGRHFNLAPLGRRRVQSQWASTRGGHKERPTVMLFPFRNLGSPTQVISKPESKEEHAIYTADLAMGTRAASTGKSKSPCQTLGGRALKENPVDLPATEQKE

SEQ ID NO: 1315 - protein, 560 aa, Homo Sapiens
MEFRQEEFRKLAGRALGKLHRLLEKRQEGAETLELSADGRPVTTQTRDPPVVDCTCFGLPRRYIIAIMSGLGFCISFGIRCNLGVAIVSMVNNSTTHRGGHVVVQKAQFSWDPETVGLIHGSFFWGYIVTQIPGGFICQKFAANRVFGFAIVATSTLNMLIPSAARVHYGCVIFVRILQGLVEGVTYPACHGIWSKWAPPLERSRLATTAFCGSYAGAVVAMPLAGVLVQYSGWSSVFYVYGSFGIFWYLFWLLVSYESPALHPSISEEERKYIEDAIGESAKLMNPLTKFSTPWRRFFTSMPVYAIIVANFCRSWTFYLLLISQPAYFEEVFGFEISKVGLVSALPHLVMTIIVPIGGQIADFLRSRRIMSTTNVRKLMNCGGFGMEATLLLVVGYSHSKGVAISFLVLAVGFSGFAISGFNVNHLDIAPRYASILMGISNGVGTLSGMVCPIIVGAMTKHKTREEWQYVFLIASLVHYGGVIFYGVFASGEKQPWAEPEEMSEEKCGFVGHDQLAGSDDSEMEDEAEPPGAPPAPPPSYGATHSTFQPPRPPPPVRDY

SEQ ID NO: 1316 - protein, 4981 aa, Homo Sapiens
MDLAPDRATGRPWLPLHTLSVSQLLRVFWLLSLLPGQAWVHGAEPRQVFQVLEEQPPGTLVGTIQTRPGFTYRLSESHALFAINSSTGALYTTSTIDRESLPSDVINLVVLSSAPTYPTEVRVLVRDLNDNAPVFPDPSIVVTFKEDSSSGRQVILDTATDSDIGSNGVDHRSYRIIRGNEAGRFRLDITLNPSGEGAFLHLVSKGGLDREVTPQYQLLVEVEDKGEPKRRGYLQVNVTVQDINDNPPVFGSSHYQAGVPEDAVVGSSVLQVAAADADEGTNADIRYRLQDEGTPFQMDPETGLITVREPLDFEARRQYSLTVQAMDRGVPSLTGRAEALIQLLDVNDNDPVVKFRYFPATSRYASVDENAQVGTVVALLTVTDADSPAANGNISVQILGGNEQRHFEVQSSKVPNLSLIKVASALDRERIPSYNLTVSVSDNYGAPPGAAVQARSSVASLVIFVNDINDHPPVFSQQVYRVNLSEEAPPGSYVSGISATDGDSGLNANLRYSIVSGNGLGWFHISEHSGLVTTGSSGGLDRELASQIVLNISARDQGVHPKVSYAQLVVTLLDVNDEKPVFSQPEGYDVSVVENAPTGTELLMLRATDGDLGDNGTVRFSLQEAETDRRSFRLDPVSGRLSTISSLDREEQAFYSLLVLATDLGSPPQSSMARINVSLLDINDNSPVFYPVQYFAHIKENEPGGSYITTVSATDPDLGTNGTVKYSISAGDRSRFQVNAQSGVISTRMALDREEKTAYQLQIVATDGGNLQSPNQAIVTITVLDTQDNPPVFSQVAYSFVVFENVALGYHVGSVSASTMDLNSNISYLITTGDQKGMFAINQVTGQLTTANVIDREEQSFYQLKVVASGGTVTGDTMVNITVKDLNDNSPHFLQAIESVNVVENWQAGHSIFQAKAVDPDEGVNGMVLYSLKQNPKNLFAINEKNGTISLLGPLDVHAGSYQIEILASDMGVPQLSSSVILTVYVHDVNDNSPVFDQLSYEVTLSESEPVNSRFFKVQASDKDSGANGEIAYTIAEGNTGDAFGIFPDGQLYIKSELDRELQDRYVLMVVASDRAVEPLSATVNVTVILEDVNDNRPLFNSTNYTFYFEEEQRAGSFVGKVSAVDKDFGPNGEVRYSFEMVQPDFELHAISGEITNTHQFDRESLMRRRGTAVFSFTVIATDQGIPQPLKDQATVHVYMKDINDNAPKFLKDFYQATISESAANLTQVLRVSASDVDEGNNGLIHYSIIKGNEERQFAIDSTSGQVTLIGKLDYEATPAYSLVIQAVDSGTIPLNSTCTLNIDILDENDNTPSFPKSTLFVDVLENMRIGELVSSVTATDSDSGDNADLYYSITGTNNHGTFSISPNTGSIFLAKKLDFETQSLYKLNITAKDQGRPPRSSTMSVVIHVRDFNDNPPSFPPGDIFKSIVENIPIGTSVISVTAHDPDADINGQLSYTIIQQMPRGNHFTIDEVKGTIYTNAEIDREFANLFELTVKANDQAVPIETRRYALKNVTILVTDLNDNVPMFISQNALAADPSAVIGSVLTTIMAADPDEGANGEIEYEIINGDTDTFIVDRYSGDLRVASALVPSQLIYNLIVSATDLGPERRKSTTELTIILQGLDGPVFTQPKYITILKEGEPIGTNVISIEAASPRGSEAPVEYYIVSVRCEEKTVGRLFTIGRHTGIIQTAAILDREQGACLYLVDVYAIEKSTAFPRTQRAEVEITLQDINDNPPVFPTDMLDLTVEENIGDGSKIMQLTAMDADEGANALVTYTIISGADDSFRIDPESGDLIATRRLDRERRSKYSLLVRADDGLQSSDMRINITVSDVNDHTPKFSRPVYSFDIPEDTIPGSLVAAILATDDDSGVNGEITYIVNEDDEDGIFFLNPITGVFNLTRLLDYEVQQYYILTVRAEDGGGQFTTIRVYFNILDVNDNPPIFSLNSYSTSLMENLPVGSTVLVFNVTDADDGINSQLTYSIASGDSLGQFTVDKNGVLKVLKALDRESQSFYNLVVQVHDLPQIPASRFTSTAQVSIILLDVNDNPPTFLSPKLTYIPENTPIDTVVFKAQATDPDSGPNSYIEYTLLNPLGNKFSIGTIDGEVRLTGELDREEVSNYTLTVVATDKGQPSLSSSTEVVVMVLDINDNNPIFAQALYKVEINENTLTGTDIIQVFAADGDEGTNGQVRYGIVNGNTNQEFRIDSVTGAITVAKPLDREKTPTYHLTVQATDRGSTPRTDTSTVSIVLLDINDFVPVFELSPYSVNVPENLGTLPRTILQVVARDDDRGSNSKLSYVLFGGNEDNAFTLSASGELGVTQSLDRETKERFVLMITATDSGSPALTGTGTINVIVDDVNDNVPTFASKAYFTTIPEDAPTGTDVLLVNASDADASKNAVIRIIGGNSQFTINPSTGQIITSALLDRETKDNYTLVVVCSDAGSPEPLSSSTSVLVTVTDVNDNPPRFQHHPYVTHIPSPTLPGSFVFAVTVTDADIGPNSELHYSLSGRNSEKFHIDPLRGAIMAAGPLNGASEVTFSVHVKDGGSFPKTDSTTVTVRFVNKADFPKVRAKEQTFMFPENQPVSSLVTTITGSSLRGEPMSYYIASGNLGNTFQIDQLTGQVSISQPLDFEKIQKYVVWIEARDGGFPPFSSYEKLDITVLDVNDNAPIFKEDPFISEILENLSPRKILTVSAMDKDSGPNGQLDYEIVNGNMENSFSINHATGEIRSVRPLDREKVSHYVLTIKSSDKGSPSQSTSVKVMINILDENDNAPRFSQIFSAHVPENSPLGYTVTRVTTSDEDIGINAISRYSIMDASLPFTINPSTGDIVISRPLNREDTDRYRIRVSAHDSGWTVSTDVTIFVTDINDNAPRFSRTSYYLDCPELTEIGSKVTQVFATDPDEGSNGQVFYFIKSQSEYFRINATTGEIFNKQILKYQNVTGFSNVNINRHSFIVTSSDRGKPSLISETTVTINIVDSNDNAPQFLKSKYFTPVTKNVKVGTKLIRVTAIDDKDFGLNSEVEYFISNDNHLGKFKLDNDTGWISVASSLISDLNQNFFITVTAKDKGNPPLSSQATVHITVTEENYHTPEFSQSHMSATIPESHSIGSIVRTVSARDRDAAMNGLIKYSISSGNEEGIFAINSSTGILTLAKALDYELCQKHEMTISAIDGGWVARTGYCSVTVNVIDVNDNSPVFLSDDYFPTVLENAPSGTTVIHLNATDADSGTNAVIAYTVQSSDSDLFVIDPNTGVITTQGFLDFETKQSYHLTVKAFNVPDEERCSFATVNIQLKGTNEYVPRFVSKLYYFEISEAAPKGTIVGEVFASDRDLGTDGEVHYLIFGNSRKKGFQINKKTGQIYVSGILDREKEERVSLKVLAKNFGSIRGADIDEVTVNVTVLDANDPPIFTLNIYSVQISEGVPIGTHVTFVSAFDSDSIPSWSRFSYFIGSGNENGAFSINPQTGQITVTAELDRETLPIYNLSVLAVDSGTPSATGSASLLVTLEDINDNGPMLTVSEGEVMENKRPGTLVMTLQSTDPDLPPNQGPFTYYLLSTGPATSYFSLSTAGVLSTTREIDREQIADFYLSVVTKDSGVPQMSSTGTVHITVIDQNDNPSQSRTVEIFVNYYGNLFPGGILGSVKPQDPDVLDSFHCSLTSGVTSLFSIPGGTCDLNSQPRSTDGTFDLTVLSNDGVHSTVTSNIRVFFAGFSNATVDNSILLRLGVPTVKDFLTNHYLHFLRIASSQLTGLGTAVQLYSAYEENNRTFLLAAVKRNHNQYVNPSGVATFFESIKEILLRQSGVKVESVDHDSCVHGPCQNGGSCLRRLAVSSVLKSRESLPVIIVANEPLQPFLCKCLPGYAGSWCEIDIDECLPSPCHSGGTCHNLVGGFSCSCPDGFTGRACERDINECLQSPCKNGAICQNFPGSFNCVCKTGYTGKMCESSVNYCECNPCFNGGSCQSGVDSYYCHCPFGVFGKHCELNSYGFEELSYMEFPSLDPNNNYIYVKFATIKSHALLLYNYDNQTGDRAEFLALEIAEERLRFSYNLGSGTYKLTTMKKVSDGHFHTVIARRAGMAASLTVDSCSENQEPGYCTVSNVAVSDDWTLDVQPNRVTVGGIRSLEPILQRRGHVESHDFVGCIMEFAVNGRPLEPSQALAAQGILDQCPRLEGACTRSPCQHGGTCMDYWSWQQCHCKEGLTGKYCEKSVTPDTALSLEGKGRLDYHMSQNEKREYLLRQSLRGAMLEPFGVNSLEVKFRTRSENGVLIHIQESSNYTTVKIKNGKVYFTSDAGIAGKVERNIPEVYVADGHWHTFLIGKNGTATVLSVDRIYNRDIIHPTQDFGGLDVLTISLGGIPPNQAHRDAQTAGFDGCIASMWYGGESLPFSGKHSLASISKTDPSVKIGCRGPNICASNPCWGDLLCINQWYAYRCVPPGDCASHPCQNGGSCEPGLHSGFTCSCPDSHTGRTCEMVVACLGVLCPQGKVCKAGSPAGHVCVLSQGPEEISLPLWAVPAIVGSCATVLALLVLSLILCNQCRGKKAKNPKEEKKPKEKKKKGSENVAFDDPDNIPPYGDDMTVRKQPEGNPKPDIIERENPYLIYDETDIPHNSETIPSAPLASPEQEIEHYDIDNASSIAPSDADIIQHYKQFRSHTPKFSIQRHSPLGFARQSPMPLGASSLTYQPSYGQGLRTSSLSHSACPTPNPLSRHSPAPFSKSSTFYRNSPARELHLPIRDGNTLEMHGDTCQPGIFNYATRLGRRSKSPQAMASHGSRPGSRLKQPIGQIPLESSPPVGLSIEEVERLNTPRPRNPSICSADHGRSSSEEDCRRPLSRTRNPADGIPAPESSSDSDSHESFTCSEMEYDREKPMVYTSRMPKLSQVNESDADDEDNYGARLKPRRYHGRRAEGGPVGTQAAAPGTADNTLPMKLGQQAGTFNWDNLLNWGPGFGHYVDVFKDLASLPEKAAANEEGKAGTTKPVPKDGEAEQYV

SEQ ID NO: 1317 - protein, 341 aa, Homo Sapiens
MLRSPTFTDAGPRCSCLPVSQTLDSMDTVLMGSLQHCCCLLPKMGDTWAQLPWPGPPHPAMLLISLLLAAGLMHSDAGTSCPVLCTCRNQVVDCSSQRLFSVPPDLPMDTRNLSLAHNRITAVPPGYLTCYMELQVLDLHNNSLMELPRGLFLHAKRLAHLDLSYNNFSHVPADMFQEAHGLVHIDLSHNPWLRRVHPQAFQGLMQLRDLDLSYGGLAFLSLEALEGLPGLVTLQIGGNPWVCGCTMEPLLKWLRNRIQRCTADSQLAECRGPPEVEGAPLFSLTEESFKACHLTLTLDDYLFIAFVGFVVSIASVATNFLLGITANCCHRWSKASEEEEI

SEQ ID NO: 1318 - protein, 292 aa, Homo Sapiens
MGWHDAEDAGAPLVYALLLQRCRQGHCEEFCVYKGSLSGYGAVLPPGFRPHFEVGLAVVVQDQLGAAVVALNRSLAITLPEPNGSAMGLTVWLHGLTASVLPGLLRQADPQHVIEYSLALVTVLNEYERALDVAAEPKHERQRRAQIRKNITETLVSLRVHTVDDIQQIAAALAQCMGPSRELVCRSCLKQTLHKLEAMMRILQAETTAGTVTPTAIGDSILNITGDLIHLASSDVRAPQRSELGAESPSRMVASQAYNLTSALTPILTRSRVLNEEPLTLAGFQQGPGQPQ

SEQ ID NO: 1319 - protein, 418 aa, Homo Sapiens
MRSLLLLSAFCLLEAALAAEVKKPAAAAAPGTAEKLSPKAATLAERSAGLAFSLYQAMAKDQAVENILVSPVVVASSLGLVSLGGKATTASQAKAVLSAEQLRDEEVHAGLGELLRSLSNSTARNVTWKLGSRLYGPSSVSFADDFVRSSKQHYNCEHSKINFRDKRSALQSINEWAAQTTDGKLPEVTKDVERTDGALLVNAMFFKPHWDEKFHHKMVDNRGFMVTRSYTVGVMMMHRTGLYNYYDDEKEKLQIVEMPLAHKLSSLIILMPHHVEPLERLEKLLTKEQLKIWMGKMQKKAVAISLPKGVVEVTHDLQKHLAGLGLTEAIDKNKADLSRMSGKKDLYLASVFHATAFELDTDGNPFDQDIYGREELRSPKLFYADHPFIFLVRDTQSGSLLFIGRLVRPKGDKMRDEL

SEQ ID NO: 1320 - protein, 478 aa, Homo Sapiens
MGRCCFYTAGTLSLLLLVTSVTLLVARVFQKAVDQSIEKKIVLRNGTEAFDSWEKPPLPVYTQFYFFNVTNPEEILRGETPRVEEVGPYTYRELRNKANIQFGDNGTTISAVSNKAYVFERDQSVGDPKIDLIRTLNIPVLTVIEWSQVHFLREIIEAMLKAYQQKLFVTHTVDELLWGYKDEILSLIHVFRPDISPYFGLFYEKNGTNDGDYVFLTGEDSYLNFTKIVEWNGKTSLDWWITDKCNMINGTDGDSFHPLITKDEVLYVFPSDFCRSVYITFSDYESVQGLPAFRYKVPAEILANTSDNAGFCIPEGNCLGSGVLNVSICKNGAPIIMSFPHFYQADERFVSAIEGMHPNQEDHETFVDINPLTGIILKAAKRFQINIYVKKLDDFVETGDIRTMVFPVMYLNESVHIDKETASRLKSMINTTLIITNIPYIIMALGVFFGLVFTWLACKGQGSMDEGTADERAPLIRT

SEQ ID NO: 1321 - protein, 558 aa, Homo Sapiens
MAALTRDPQFQKLQQWYREHRSELNLRRLFDANKDRFNHFSLTLNTNHGHILVDYSKNLVTEDVMRMLVDLAKSRGVEAARERMFNGEKINYTEGRAVLHVALRNRSNTPILVDGKDVMPEVNKVLDKMKSFCQRVRSGDWKGYTGKTITDVINIGIGGSDLGPLMVTEALKPYSSGGPRVWYVSNIDGTHIAKTLAQLNPESSLFIIASKTFTTQETITNAETAKEWFLQAAKDPSAVAKHFVALSTNTTKVKEFGIDPQNMFEFWDWVGGRYSLWSAIGLSIALHVGFDNFEQLLSGAHWMDQHFRTTPLEKNAPVLLALLGIWYINCFGCETHAMLPYDQYLHRFAAYFQQGDMESNGKYITKSGTRVDHQTGPIVWGEPGTNGQHAFYQLIHQGTKMIPCDFLIPVQTQHPIRKGLHHKILLANFLAQTEALMRGKSTEEARKELQAAGKSPEDLERLLPHKVFEGNRPTNSIVFTKLTPFMLGALVAMYEHKIFVQGIIWDINSFDQWGVELGKQLAKKIEPELDGSAQVTSHDASTNGLINFIKQQREARVQ

SEQ ID NO: 1322 - protein, 172 aa, Homo Sapiens
MPDSWDKDVYPEPPRRTPVQPNPIVYMMKAFDLIVDRPVTLVREFIERQHAKNRYYYYHRQYRRVPDITECKEEDIMCMYEAEMQWKRDYKVDQEIINIMQDRLKACQQREGQNYQQNCIKEVEQFTQVAKAYQDRYQDLGAYSSARKCLAKQRQRMLQERKAAKEAAAATS

SEQ ID NO: 1323 - protein, 172 aa, Homo Sapiens
MIIYRDLISHDEMFSDIYKIREIADGLCLEVEGKMVSRTEGNIDDSLIGGNASAEGPEGEGTESTVITGVDIVMNHHLQETSFTKEAYKKYIKDYMKSIKGKLEEQRPERVKPFMTGAAEQIKHILANFKNYQFFIGENMNPDGMVALLDYREDGVTPYMIFFKDGLEMEKC

SEQ ID NO: 1324 - protein, 537 aa, Homo Sapiens
MAHCVTLVQLSISCDHLIDKDIGSKSDPLCVLLQDVGGGSWAELGRTERVRNCSSPEFSKTLQLEYRFETVQKLRFGIYDIDNKTPELRDDDFLGGAECSLGQIVSSQVLTLPLMLKPGKPAGRGTITVSAQELKDNRVVTMEVEARNLDKKDFLGKSDPFLEFFRQGDGKWHLVYRSEVIKNNLNPTWKRFSVPVQHFCGGNPSTPIQVQCSDYDSDGSHDLIGTFHTSLAQLQAVPAEFECIHPEKQQKKKSYKNSGTIRVKICRVETEYSFLDYVMGGCQINFTVGVDFTGSNGDPSSPDSLHYLSPTGVNEYLMALWSVGSVVQDYDSDKLFPAFGFGAQVPPDWQVSHEFALNFNPSNPYCAGIQGIVDAYRQALPQVRLYGPTNFAPIINHVARFAAQAAHQGTASQYFMLLLLTDGAVTDVEATREAVVRASNLPMSVIIVGVGGADFEAMEQLDADGGPLHTRSGQAAARDIVQFVPYRRFQNAPREALAQTVLAEVPTQLVSYFRAQGWAPLKPLPPSAKDPAQAPQA

SEQ ID NO: 1325 - protein, 376 aa, Homo Sapiens
MESYDVIANQPVVIDNGSGVIKAGFAGDQIPKYCFPNYVGRPKHVRVMAGALEGDIFIGPKAEEHRGLLSIRYPMEHGIVKDWNDMERIWQYVYSKDQLQTFSEEHPVLLTEAPLNPRKNRERAAEVFFETFNVPALFISMQAVLSLYATGRTTGVVLDSGDGVTHAVPIYEGFAMPHSIMRIDIAGRDVSRFLRLYLRKEGYDFHSSSEFEIVKAIKERACYLSINPQKDETLETEKAQYYLPDGSTIEIGPSRFRAPELLFRPDLIGEESEGIHEVLVFAIQKSDMDLRRTLFSNIVLSGGSTLFKGFGDRLLSEVKKLAPKDVKIRISAPQERLYSTWIGGSILASLDTFKKMWVSKKEYEEDGARSIHRKTF

SEQ ID NO: 1326 - protein, 426 aa, Homo Sapiens
MAHLRGFANQHSRVDPEELFTKLDRIGKGSFGEVYKGIDNHTKEVVAIKIIDLEEAEDEIEDIQQEITVLSQCDSPYITRYFGSYLKSTKLWIIMEYLGGGSALDLLKPGPLEETYIATILREILKGLDYLHSERKIHRDIKAANVLLSEQGDVKLADFGVAGQLTDTQIKRNTFVGTPFWMAPEVIKQSAYDFKADIWSLGITAIELAKGEPPNSDLHPMRVLFLIPKNSPPTLEGQHSKPFKEFVEACLNKDPRFRPTAKELLKHKFITRYTKKTSFLTELIDRYKRWKSEGHGEESSSEDSDIDGEAEDGEQGPIWTFPPTIRPSPHSKLHKGTALHSSQKPAEPVKRQPRSQCLSTLVRPVFGELKEKHKQSGGSVGALEELENAFSLAEESCPGISDKLMVHLVERVQRFSHNRNHLTSTR

SEQ ID NO: 1327 - protein, 501 aa, Homo Sapiens
METILEQQRRYHEEKERLMDVMAKEMLTKKSTLRDQINSDHRTRAMQDRYMEVSGNLRDLYDDKDGLRKEELNAISGPNEFAEFYNRLKQIKEFHRKHPNEICVPMSVEFEELLKARENPSEEAQNLVEFTDEEGYGRYLDLHDCYLKYINLKASEKLDYITYLSIFDQLFDIPKERKNAEYKRYLEMLLEYLQDYTDRVKPLQDQNELFGKIQAEFEKKWENGTFPGWPKETSSALTHAGAHLDLSAFSSWEELASLGLDRLKSALLALGLKCGGTLEERAQRLFSTKGKSLESLDTSLFAKNPKSKGTKRDTERNKDIAFLEAQIYEYVEILGEQRHLTHENVQRKQARTGEEREEEEEEQISESESEDEENEIIYNPKNLPLGWDGKPIPYWLYKLHGLNINYNCEICGNYTYRGPKAFQRHFAEWRHAHGMRCLGIPNTAHFANVTQIEDAVSLWAKLKLQKASERWQPDTEEEYEDSSGNVVNKKTYEDLKRQGLL

SEQ ID NO: 1328 - protein, 2517 aa, Homo Sapiens
MVGERHAGDLMVPLGPRLQAYPEELIRQRPGHDGHPEYLIRWSVLKCGEVGKVGVEEGKAEHILMWLSAPEVYANCPGLLGERALSKGLQHEPAGVSGSFPRDPGGLDEVAMGEMEADVQALVRRAARQLAESGTPSLTAAVLHTIHVLSAYASIGPLTGVFRETGALDLLMHMLCNPEPQIRRSAGKMLQALAAHDAGSRAHVLLSLSQQDGIEQHMDFDSRYTLLELFAETTSSEEHCMAFEGIHLPQIPGKLLFSLVKRYLCVTSLLDQLNSSPELGAGDQSSPCATREKSRGQRELEFSMAVGNLISELVRSMGWARNLSEQGMSPPRPTRSIFQPYISGPSLLLPTIVTTPRRQGWVFRQRSEFSSRSGYGEYVQQTLQPGMRVRMLDDYEEISAGDEGEFRQSNNGIPPVQVFWQSTGRTYWVHWHMLEILGPEEATEDKASAAVEKGAGATVLGTAFPSWDWNPMDGLYPLPYLQPEPQKNERVGYLTQAEWWELLFFIKKLDLCEQQPIFQNLWKNLDETLGEKALGEISVSVEMAESLLQVLSSRFEGSTLNDLLNSQIYTKYGLLSNEPSSSSTSRNHSCTPDPEEESKSEASFSEEETESLKAKAEAPKTEAEPTKTRTETPMAQSDSQLFNQLLVTEGMTLPTEMKEAASEMARALRGPGPRSSLDQHVAAVVATVQISSLDTNLQLSGLSALSQAVEEVTERDHPLVRPDRSLREKLVKMLVELLTNQVGEKMVVVQALRLLYLLMTKHEWRPLFAREGGIYAVLVCMQEYKTSVLVQQAGLAALKMLAVASSSEIPTFVTGRDSIHSLFDAQMTREIFASIDSATRPGSESLLLTVPAAVILMLNTEGCSSAARNGLLLLNLLLCNHHTLGDQIITQELRDTLFRHSGIAPRTEPMPTTRTILMMLLNRYSEPPGSPERAALETPIIQGQDGSPELLIRSLVGGPSAELLLDLERVLCREGSPGGAVRPLLKRLQQETQPFLLLLRTLDAPGPNKTLLLSVLRVITRLLDFPEAMVLPWHEVLEPCLNCLSGPSSDSEIVQELTCFLHRLASMHKDYAVVLCCLGAKEILSKVLDKHSAQLLLGCELRDLVTECEKYAQLYSNLTSSILAGCIQMVLGQIEDHRRTHQPINIPFFDVFLRHLCQGSSVEVKEDKCWEKVEVSSNPHRASKLTDHNPKTYWESNGSTGSHYITLHMHRGVLVRQLTLLVASEDSSYMPARVVVFGGDSTSCIGTELNTVNVMPSASRVILLENLNRFWPIIQIRIKRCQQGGIDTRVRGVEVLGPKPTFWPLFREQLCRRTCLFYTIRAQAWSRDIAEDHRRLLQLCPRLNRVLRHEQNFADRFLPDDEAAQALGKTCWEALVSPLVQNITSPDAEGVSALGWLLDQYLEQRETSRNPLSRAASFASRVRRLCHLLVHVEPPPGPSPEPSTRPFSKNSKGRDRSPAPSPVLPSSSLRNITQCWLSVVQEQVSRFLAAAWRAPDFVPRYCKLYEHLQRAGSELFGPRAAFMLALRSGFSGALLQQSFLTAAHMSEQFARYIDQQIQGGLIGGAPGVEMLGQLQRHLEPIMVLSGLELATTFEHFYQHYMADRLLSFGSSWLEGAVLEQIGLCFPNRLPQLMLQSLSTSEELQRQFHLFQLQRLDKLFLEQEDEEEKRLEEEEEEEEEEEAEKELFIEDPSPAISILVLSPRCWPVSPLCYLYHPRKCLPTEFCDALDRFSSFYSQSQNHPVLDMGPHRRLQWTWLGRAELQFGKQILHVSTVQMWLLLKFNQTEEVSVETLLKDSDLSPELLLQALVPLTSGNGPLTLHEGQDFPHGGVLRLHEPGPQRSGEALWLIPPQAYLNVEKDEGRTLEQKRNLLSCLLVRILKAHGEKGLHIDQLVCLVLEAWQKGPNPPGTLGHTVAGGVACTSTDVLSCILHLLGQGYVKRRDDRPQILMYAAPEPMGPCRGQADVPFCGSQSETSKPSPEAVATLASLQLPAGRTMSPQEVEGLMKQTVRQVQETLNLEPDVAQHLLAHSHWGAEQLLQSYSEDPEPLLLAAGLCVHQAQAVPVRPDHCPVCVSPLGCDDDLPSLCCMHYCCKSCWNEYLTTRIEQNLVLNCTCPIADCPAQPTGAFIRAIVSSPEVISKYEKALLRGYVESCSNLTWCTNPQGCDRILCRQGLGCGTTCSKCGWASCFNCSFPEAHYPASCGHMSQWVDDGGYYDGMSVEAQSKHLAKLISKRCPSCQAPIEKNEGCLHMTCAKCNHGFCWRCLKSWKPNHKDYYNCSAMVSKAARQEKRFQDYNERCTFHHQAREFAVNLRNRVSAIHEVPPPRSFTFLNDACQGLEQARKVLAYACVYSFYSQDAEYMDVVEQQTENLELHTNALQILLEETLLRCRDLASSLRLLRADCLSTGMELLRRIQERLLAILQHSAQDFRVGLQSPSVEAWEAKGPNMPGSQPQASSGPEAEEEEEDDEDDVPEWQQDEFDEELDNDSFSYDESENLDQETFFFGDEEEDEDEAYD

SEQ ID NO: 1329 - protein, 789 aa, Homo Sapiens
MAAAPVAAGSGAGRGRRSAATVAAWGGWGGRPRPGNILLQLRQGQLTGRGLVRAVQFTETFLTERDKQSKWSGIPQLLLKLHTTSHLHSDFVECQNILKEISPLLSMEAMAFVTEERKLTQETTYPNTYIFDLFGGVDLLVEILMRPTISIRGQKLKISDEMSKDCLSILYNTCVCTEGVTKRLAEKNDFVIFLFTLMTSKKTFLQTATLIEDILGVKKEMIRLDEVPNLSSLVSNFDQQQLANFCRILAVTISEMDTGNDDKHTLLAKNAQQKKSLSLGPSAAEINQAALLSIPGFVERLCKLATRKVSESTGTASFLQELEEWYTWLDNALVLDALMRVANEESEHNQGASEENGLPHTSARTQLPQSMKIMHEIMYKLEVLYVLCVLLMGRQRNQVHRMIAEFKLIPGLNNLFDKLIWRKHSASALVLHGHNQNCDCSPDITLKIQFLRLLQSFSDHHENKYLLLNNQELNELSAISLKANIPEVEAVLNTDRSLVCDGKRGLLTRLLQVMKKEPAESSFRFWQARAVESFLRGTTSYADQMFLLKRGLLEHILYCIVDSECKSRDVLQSYFDLLGELMKFNVDAFKRFNKYINTDAKFQVFLKQINSSLVDSNMLVRCVTLSLDRFENQVDMKVAEVLSECRLLAYISQVPTQMSFLFRLINIIHVQTLTQENVSCLNTSLVILMLARRKERLPLYLRLLQRMEHSKKYPGFLLNNFHNLLRFWQQHYLHKDKDSTCLENSSCISFSYWKETVSILLNPDRQSPSALVSYIEEPYMDIDRDFTEE

SEQ ID NO: 1330 - protein, 423 aa, Homo Sapiens
MAGKRSGWSRAALLQLLLGVNLVVMPPTRARSLRFVTLLYRHGDRSPVKTYPKDPYQEEEWPQGFGQLTKEGMLQHWELGQALRQRYHGFLNTSYHRQEVYVRSTDFDRTLMSAEANLAGLFPPNGMQRFNPNISWQPIPVHTVPITEDRLLKFPLGPCPRYEQLQNETRQTPEYQNESSRNAQFLDMVANETGLTDLTLETVWNVYDTLFCEQTHGLRLPPWASPQTMQRLSRLKDFSFRFLFGIYQQAEKARLQGGVLLAQIRKNLTLMATTSQLPKLLVYSAHDTTLVALQMALDVYNGEQAPYASCHIFELYQEDSGNFSVEMYFRNESDKAPWPLSLPGCPHRCPLQDFLRLTEPVVPKDWQQECQLASGPADTEVIVALAVCGSILFLLIVLLLTVLFRMQAQPPGYRHVADGEDHA

SEQ ID NO: 1331 - protein, 493 aa, Homo Sapiens [sequence omitted]

SEQ ID NO: 1332 - protein, 316 aa, Homo Sapiens
MASTSRLDALPRVTCPNHPDAILVEDYRAGDMICPECGLVVGDRVIDVGSEWRTFSNDKATKDPSRVGDSQNPLLSDGDLSTMIGKGTGAASFDEFGNSKYQNRRTMSSSDRAMMNAFKEITTMADRINLPRNIVDRTNNLFKQVYEQKSLKGRANDAIASACLYIACRQEGVPRTFKEICAVSRISKKEIGRCFKLILKALETSVDLITTGDFMSRFCSNLCLPKQVQMAATHIARKAVELDLVPGRSPISVAAAAIYMASQASAEKRTQKEIGDIAGVADVTIRQSYRLIYPRAPDLFPTDFKFDTPVDKLPQL

SEQ ID NO: 1333 - protein, 302 aa, Homo Sapiens
MEPGPDGPAASGPAAIREGWFRETCSLWPGQALSLQVEQLLHHRRSRYQDILVFRSKTYGNVLVLDGVIQCTERDEFSYQEMIANLPLCSHPNPRKVLIIGGGDGGVLREVVKHPSVESVVQCEIDEDVIQVSKKFLPGMAIGYSSSKLTLHVGDGFEFMKQNQDAFDVIITDSSDPMGPAESLFKESYYQLMKTALKEDGVLCCQGECQWLHLDLIKEMRQFCQSLFPVVAYAYCTIPTYPSGQIGFMLCSKNPSTNFQEPVQPLTQQQVAQMQLKYYNSDVHRAAFVLPEFARKALNDVS

SEQ ID NO: 1334 - protein, 722 aa, Homo Sapiens
MYRALYAFRSAEPNALAFAAGETFLVLERSSAHWWLAARARSGETGYVPPAYLRRLQGLEQDVLQAIDRAIEAVHNTAMRDGGKYSLEQRGVLQKLIHHRKETLSRRGPSASSVAVMTSSTSDHHLDAAAARQPNGVCRAGFERQHSLPSSEHLGADGGLYQIPLPSSQIPPQPRRAAPTTPPPPVKRRDREALMASGSGGHNTMPSGGNSVSSGSSVSSTSLDTLYTSSSPSEPGSSCSPTPPPVPRRGTHTTVSQVQPPPSKASAPEPPAEEEVATGTTSASDDLEALGTLSLGTTEEKAAAEAAVPRTIGAELMELVRRNTGLSHELCRVAIGIIVGHIQASVPASSPVMEQVLLSLVEGKDLSMALPSGQVCHDQQRLEVIFADLARRKDDAQQRSWALYEDEGVIRCYLEELLHILTDADPEVCKKMCKRNEFESVLALVAYYQMEHRASLRLLLLKCFGAMCSLDAAIISTLVSSVLPVELARDMQTDTQDHQKLCYSALILAMVFSMGEAVPYAHYEHLGTPFAQFLLNIVEDGLPLDTTEQLPDLCVNLLLALNLHLPAADQNVIMAALSKHANVKIFSEKLLLLLNRGDDPVRIFKHEPQPPHSVLKFLQDVFGSPATAAIFYHTDMMALIDITVRHIADLSPGDKLRMEYLSLMHAIVRTTPYLQHRHRLPDLQAILRRILNEEETSPQCQMDRMIVREMCKEFLVLGEAPS

SEQ ID NO: 1335 - protein, 311 aa, Homo Sapiens
MAEASPHPGRYFCHCCSVEIVPRLPDYICPRCESGFIEELPEETRSTENGSAPSTAPTDQSRPPLEHVDQHLFTLPQGYGQFAFGIFDDSFEIPTFPPGAQADDGRDPESRRERDHPSRHRYGARQPRARLTTRRATGRHEGVPTLEGIIQQLVNGIITPATIPSLGPWGVLHSNPMDYAWGANGLDAIITQLLNQFENTGPPPADKEKIQALPTVPVTEEHVGSGLECPVCKDDYALGERVRQLPCNHLFHDGCIVPWLEQHDSCPVCRKSLTGQNTATNPPGLTGVSFSSSSSSSSSSSPSNENATSNS

SEQ ID NO: 1336 - protein, 392 aa, Homo Sapiens
MDLFGDLPEPERSPRPAAGKEAQKGPLLFDDLPPASSTDSGSGGPLLFDDLPPASSGDSGSLATSISQMVKTEGKGAKRKTSEEEKNGSEELVEKKVCKASSVIFGLKGYVAERKGEREEMQDAHVILNDITEECRPPSSLITRVSYFAVFDGHGGIRASKFAAQNLHQNLIRKFPKGDVISVEKTVKRCLLDTFKHTDEEFLKQASSQKPAWKDGSTATCVLAVDNILYIANLGDSRAILCRYNEESQKHAALSLSKEHNPTQYEERMRIQKAGGNVRDGRVLGVLEVSRSIGDGQYKRCGVTSVPDIRRCQLTPNDRFILLACDGLFKVFTPEEAVNFILSCLEDEKIQTREGKSAADARYEAACNRLANKAVQRGSADNVTVMVVRIGH

SEQ ID NO: 1337 - protein, 358 aa, Homo Sapiens
MAAVLKPVLLGLRDAPVHGSPTGPGAWTASKLGGIPDALPTVAAPRPVCQRCGQPLALVVQVYCPLEGSPFHRLLHVFACACPGCSTGGARSWKVFRSQCLQVPEREAQDAQKQGNSLAAEDWCEGADDWGSDTEEGPSPQFTLDFGNDASSAKDVDWTARLQDLRLQDAVLGAAHPVPPGLPLFLPYYICVADEDDYRDFVNLDHAHSLLRDYQQREGIAMDQLLSQSLPNDGDEKYEKTIIKSGDQTFYKFMKRIAACQEQILRYSWSGEPLFLTCPTSEVTELPACSQCGGQRIFEFQLMPALVSMLKSANLGLSVEFGTILVYTCEKSCWPPNHQTPMEEFCIIQEDPDELLFK

SEQ ID NO: 1338 - protein, 923 aa, Homo Sapiens
MLENYRNLVSLAMCSHFTQDFLPVQGIEDSFHKLILRRYEKCGHDNLQLRKGCKSMNVCKVQKGVYNGINKCLSNTQSKIFQCNARVKVFSKFANSNKDKTRHTGEKHFKCNECGKSFQKFSDLTQHKGIHAGEKPYTCEERGKDFGWYTDLNQHKKIHTGEKPYKCEECGKAFNRSTNLTAHKRIHNREKAYTGEDRDRAFGWSTNLNEYKKIHTGDKPYKCKECGKAFMHSSHLNKHEKIHTGEKPYKCKECGKVISSSSSFAKHKRIHTGEKPFKCLECGKAFNISTTLTKHRRIHTGEKPYTCEVCGKAFRQSANLYVHRRIHTGEKPYTCGECGKTFRQSANLYVHRRIHTGEKPYKCEDCGKAFGRYTALNQHKKIHTGEKPYKCEECGKAFNSSTNLTAHKRIHTREKPYTCEDRGRAFGLSTNLNEYKKIHTGDKPYKCKECGKAFIHSLHLNKHEKIHTGKKPYKCKQCGKVITSSSSFAKHKRIHTGEKPFECLECGKAFTSSTTLTKHRRIHTGEKPYTCEVCGKAFRQSAILYVHRRIHTGEKPYTCEECGKTFRQSANLYVHRRIHTGEKPYKCEECGKAFGRYTDLNQHKKIHTGEKLYKCEECGKDFVWYTDLNQQKKIYTGEKPYKCEECGKAFAPSTDLNQHTKILTGEQSYKCEECGKAFGWSIALNQHKKIHTGEKPYKCEECGKAFSRSRNLTTHRRVHTREKPYKCEDRGRSFGWSTNLNEYKKIHTGDKLYKCKECGKVFKQSSHLNRHEKIHTGKKPYKCKECGKVITSSSSFAKHKRIHTGEKPFKCLECGKAFTSSTTLTKHRRIHTGEKPYTCEECGKAFRQSAILYVHRRIHTGEKPYTCGECGKTFRQSANLYAHKKIHTGEKPYTCGDCGKTFRQSANLYAHKKIHTGDKTIQV

SEQ ID NO: 1339 - protein, 272 aa, Homo Sapiens
MSDQQLDCALDLMRRLPPQQIEKNLSDLIDLVPSLCEDLLSSVDQPLKIARDKVVGKDYLLCDYNRDGDSYRSPWSNKYDPPLEDGAMPSARLRKLEVEANNAFDQYRDLYFEGGVSSVYLWDLDHGFAGVILIKKAGDGSKKIKGCWDSIHVVEVQEKSSGRTAHYKLTSTVMLWLQTNKSGSGTMNLGGSLTRQMEKDETVSDCSPHIANIGRLVEDMENKIRSTLNEIYFGKTKDIVNGLRSVQTFADKSKQEALKNDLVEALKRKQQC

SEQ ID NO: 1340 - protein, 380 aa, Homo Sapiens
MGIQGLAKLIADVAPSAIRENDIKSYFGRKVAIDASMSIYQFLIAVRQGGDVLQNEEGETTSHLMGMFYRTIRMMENGIKPVYVFDGKPPQLKSGELAKRSERRAEAEKQLQQAQAAGAEQEVEKFTKRLVKVTKQHNDECKHLLSLMGIPYLDAPSEAEASCAALVKAGKVYAAATEDMDCLTFGSPVLMRHLTASEAKKLPIQEFHLSRILQELGLNQEQFVDLCILLGSDYCESIRGIGPKRAVDLIQKHKSIEEIVRRLDPNKYPVPENWLHKEAHQLFLEPEVLDPESVELKWSEPNEEELIKFMCGEKQFSEERIRSGVKRLSKSRQGSTQGRLDDFFKVTGSLSSAKRKEPEPKGSTKKKAKTGAAGKFKRGK

SEQ ID NO: 1341 - protein, 876 aa, Homo Sapiens
MELITILEKTVSPDRLELEAAQKFLERAAVENLPTFLVELSRVLANPGNSQVARVAAGLQIKNSLTSKDPDIKAQYQQRWLAIDANARREVKNYVLQTLGTETYRPSSASQCVAGIACAEIPVNQWPELIPQLVANVTNPNSTEHMKESTLEAIGYICQDIDPEQLQDKSNEILTAIIQGMRKEEPSNNVKLAATNALLNSLEFTKANFDKESERHFIMQVVCEATQCPDTRVRVAALQNLVKIMSLYYQYMETYMGPALFAITIEAMKSDIDEVALQGIEFWSNVCDEEMDLAIEASEAAEQGRPPEHTSKFYAKGALQYLVPILTQTLTKQDENDDDDDWNPCKAAGVCLMLLATCCEDDIVPHVLPFIKEHIKNPDWRYRDAAVMAFGCILEGPEPSQLKPLVIQAMPTLIELMKDPSVVVRDTAAWTVGRICELLPEAAINDVYLAPLLQCLIEGLSAEPRVASNVCWAFSSLAEAAYEAADVADDQEEPATYCLSSSFELIVQKLLETTDRPDGHQNNLRSSAYESLMEIVKNSAKDCYPAVQKTTLVIMERLQQVLQMESHIQSTSDRIQFNDLQSLLCATLQNVLRKVQHQDALQISDVVMASLLRMFQSTAGSGGVQEDALMAVSTLVEVLGGEFLKYMEAFKPFLGIGLKNYAEYQVCLAAVGLVGDLCRALQSNIIPFCDEVMQLLLENLGNENVHRSVKPQILSVFGDIALAIGGEFKKYLEVVLNTLQQASQAQVDKSDYDMVDYLNELRESCLEAYTGIVQGLKGDQENVHPDVMLVQPRVEFILSFIDHIAGDEDHTDGVVACAAGLIGDLCTAFGKDVLKLVEARPMIHELLTEGRRSKTNKAKTLATWATKELRKLKNQA

SEQ ID NO: 1342 - protein, 1257 aa, Homo Sapiens
MVVALRYVWPLLLCSPCLLIQIPEEYEGHHVMEPPVITEQSPRRLVVFPTDDISLKCEASGKPEVQFRWTRDGVHFKPKEELGVTVYQSPHSGSFTITGNNSNFAQRFQGIYRCFASNKLGTAMSHEIRLMAEGAPKWPKETVKPVEVEEGESVVLPCNPPPSAEPLRIYWMNSKILHIKQDERVTMGQNGNLYFANVLTSDNHSDYICHAHFPGTRTIIQKEPIDLRVKATNSMIDRKPRLLFPTNSSSHLVALQGQPLVLECIAEGFPTPTIKWLRPSGPMPADRVTYQNHNKTLQLLKVGEEDDGEYRCLAENSLGSARHAYYVTVEAAPYWLHKPQSHLYGPGETARLDCQVQGRPQPEVTWRINGIPVEELAKDQKYRIQRGALILSNVQPSDTMVTQCEARNRHGLLLANAYIYVVQLPAKILTADNQTYMAVQGSTAYLLCKAFGAPVPSVQWLDEDGTTVLQDERFFPYANGTLGIRDLQANDTGRYFCLAANDQNNVTIMANLKVKDATQITQGPRSTIEKKGSRVTFTCQASFDPSLQPSITWRGDGRDLQELGDSDKYFIEDGRLVIHSLDYSDQGNYSCVASTELDVVESRAQLLVVGSPGPVPRLVLSDLHLLTQSQVRVSWSPAEDHNAPIEKYDIEFEDKEMAPEKWYSLGKVPGNQTSTTLKLSPYVHYTFRVTAINKYGPGEPSPVSETVVTPEAAPEKNPVDVKGEGNETTNMVITWKPLRWMDWNAPQVQYRVQWRPQGTRGPWQEQIVSDPFLVVSNTSTFVPYEIKVQAVNSQGKGPEPQVTIGYSGEDYPQAIPELEGIEILNSSAVLVKWRPVDLAQVKGHLRGYNVTYWREGSQRKHSKRHIHKDHVVVPANTTSVILSGLRPYSSYHLEVQAFNGRGSGPASEFTFSTPEGVPGHPEALHLECQSNTSLLLRWQPPLSHNGVLTGYVLSYHPLDEGGKGQLSFNLRDPELRTHNLTDLSPHLRYRFQLQATTKEGPGEAIVREGGTMALSGISDFGNISATAGENYSVVSWVPKEGQCNFRFHILFKALGEEKGGASLSPQYVSYNQSSYTQWDLQPDTDYEIHLFKERMFRHQMAVKTNGTGRVRLPPAGFATEGWFIGFVSAIILLLLVLLILCFIKRSKGGKYSVKDKEDTQVDSEARPMKDETFGEYRSLESDNEEKAFGSSQPSLNGDIKPLGSDDSLADYGGSVDVQFNEDGSFIGQYSGKKEKEAAGGNDSSGATSPINPAVALE

SEQ ID NO: 1343 - protein, 780 aa, Homo Sapiens
MTHEEHHAAKTLGIGKAIAVLTSGGDAQGMNAAVRAVVRVGIFTGARVFFVHEGYQGLVDGGDHIKEATWESVSMMLQLGGTVIGSARCKDFREREGRLRAAYNLVKRGITNLCVIGGDGSLTGADTFRSEWSDLLSDLQKAGKITDEEATKSSYLNIVGLVGSIDNDFCGTDMTIGTDSALHRIMEIVDAITTTAQSHQRTFVLEVMGRHCGYLALVTSLSCGADWVFIPECPPDDDWEEHLCRRLSETRTRGSRLNIIIVAEGAIDKNGKPITSEDIKNLVVKRLGYDTRVTVLGHVQRGGTPSAFDRILGSRMGVEAVMALLEGTPDTPACVVSLSGNQAVRLPLMECVQVTKDVTKAMDEKKFDEALKLRGRSFMNNWEVYKLLAHVRPPVSKSGSHTVAVMNVGAPAAGMNAAVRSTVRIGLIQGNRVLVVHDGFEGLAKGQIEEAGWSYVGGWTGQGGSKLGTKRTLPKKSFEQISANITKFNIQGLVIIGGFEAYTGGLELMEGRKQFDELCIPFVVIPATVSNNVPGSDFSVGADTALNTICTTCDRIKQSAAGTKRRVFIIETMGGYCGYLATMAGLAAGADAAYIFEEPFTIRDLQANVEHLVQKMKTTVKRGLVLRNEKCNENYTTDFIFNLYSEEGKGIFDSRKNVLGHMQQGGSPTPFDRNFATKMGAKAMNWMSGKIKESYRNGRIFANTPDSGCVLGMRKRALVFQPVAELKDQTDFEHRIPKEQWWLKLRPILKILAKYEIDLDTSDHAHLEHITRKRSGEAAV

SEQ ID NO: 1344 - protein, 1174 aa, Homo Sapiens
MYDADEDMQYDEDDDEITPDLWQEACWIVISSYFDEKGLVRQQLDSFDEFIQMSVQRIVEDAPPIDLQAEAQHASGEVEEPPRYLLKFEQIYLSKPTHWERDGAPSPMMPNEARLRNLTYSAPLYVDITKTVIKEGEEQLQTQHQKTFIGKIPIMLRSTYCLLNGLTDRDLCELNECPLDPGGYFIINGSEKVLIAQEKMATNTVYVFAKKDSKYAYTGECRSCLENSSRPTSTIWVSMLARGGQGAKKSAIGQRIVATLPYIKQEVPIIIVFRALGFVSDRDILEHIIYDFEDPEMMEMVKPSLDEAFVIQEQNVALNFIGSRGAKPGVTKEKRIKYAKEVLQKEMLPHVGVSDFCETKKAYFLGYMVHRLLLAALGRRELDDRDHYGNKRLDLAGPLLAFLFRGMFKNLLKEVRIYAQKFIDRGKDFNLELAIKTRIISDGLKYSLATGNWGDQKKAHQARAGVSQVLNRLTFASTLSHLRRLNSPIGRDGKLAKPRQLHNTLWGMVCPAETPEGHAVGLVKNLALMAYISVGSQPSPILEFLEEWSMENLEEISPAAIADATKIFVNGCWVGIHKDPEQLMNTLRKLRRQMDIIVSEVSMIRDIREREIRIYTDAGRICRPLLIVEKQKLLLKKRHIDQLKEREYNNYSWQDLVASGVVEYIDTLEEETVMLAMTPDDLQEKEVAYCSTYTHCEIHPSMILGVCASIIPFPDHNQSPRNTYQSAMGKQAMGVYITNFHVRMDTLAHVLYYPQKPLVTTRSMEYLRFRELPAGINSIVAIASYTGYNQEDSVIMNRSAVDRGFFRSVFYRSYKEQESKKGFDQEEVFEKPTRETCQGMRHAIYDKLDDDGLIAPGVRVSGDDVIIGKTVTLPENEDELESTNRRYTKRDCSTFLRTSETGIVDQVMVTLNQEGYKFCKIRVRSVRIPQIGDKFASRHGQKGTCGIQYRQEDMPFTCEGITPDIIINPHAIPSRMTIGHLIECLQGKVSANKGEIGDATPFNDAVNVQKISNLLSDYGYHLRGNEVLYNGFTGRKITSQIFIGPTYYQRLKHMVDDKIHSRARGPIQILNRQPMEGRSRDGGLRFGEMERDCQIAHGAAQFLRERLFEASDPYQVHVCNLCGIMAIANTRTHTYECRGCRNKTQISLVRMPYACKLLFQELMSMSIAPRMMSV

SEQ ID NO: 1345 - protein, 350 aa, Homo Sapiens
MFIKGRAPRAPPRERRRATRGGLRQVVAPPRALGSTSRPHFRRASVCRRRCRKSGGLLAASRKMAAAAVNGAAGFSSSGPAATSGAVLQAATGMYEQLKGEWNRKSPNLSKCGEELGRLKLVLLELNFLPTTGTKLTKQQLILARDILEIGAQWSILRKDIPSFERYMAQLKCYYFDYKEQLPESAYMHQLLGLNLLFLLSQNRVAEFHTELERLPAKDIQTNVYIKHPVSLEQYLMEGSYNKVFLAKGNIPAESYTFFIDILLDTIRDEIAGCIEKAYEKILFTEATRILFFNTPKKMTDYAKKRGWVLGPNNYYSFASQQQKPEDTTIPSTELAKQVIEYARQLEMIV

SEQ ID NO: 1346 - protein, 470 aa, Homo Sapiens
MTPGLQHPPTVVQRPGMPSGARMPHQGAPMGPPGSPYMGSPAVRPGLAPAGMEPARKRAAPPPGQSQAQSQGQPVPTAPARSRSAKRRKMADKILPQRIRELVPESQAYMDLLAFERKLDQTIMRKRVDIQEALKRPMKQKRKLRLYISNTFNPAKPDAEDSDGSIASWELRVEGKLLDDPSKQKRKFSSFFKSLVIELDKDLYGPDNHLVEWHRTPTTQETDGFQVKRPGDLSVRCTLLLMLDYQPPQFKLDPRLARLLGLHTQSRSAIVQALWQYVKTNRLQDSHDKEYINGDKYFQQIFDCPRLKFSEIPQRLTALLLPPDPIVINHVISVDPSDQKKTACYDIDVEVEEPLKGQMSSFLLSTANQQEISALDSKIHETIESINQLKIQRDFMLSFSRDPKGYVQDLLRSQSRDLKVMTDVAGNPEEERRAEFYHQPWSQEAVSRYFYCKIQQRRQELEQSLVVRNT

SEQ ID NO: 1347 - protein, 299 aa, Homo Sapiens
MMGKEEEIARIARRLDKMVTKKSAEGAMDLLRELKAMPITLHLLQSTRVGMSVNALRKQSSDEEVIALAKSLIKSWKKLLDASDAKARERGRGMPLPTSSRDASEAPDPSRKRPELPRAPSTPRITTFPPVPVTCDAVRNKCREMLTAALQTDHDHVAIGADCERLSAQIEECIFRDVGNTDMKYKNRVRSRISNLKDAKNPDLRRNVLCGAITPQQIAVMTSEEMASDELKEIRKAMTKEAIREHQMARTGGTQTDLFTCGKCRKKNCTYTQVQTRSSDEPMTTFVVCNECGNRWKFC

SEQ ID NO: 1348 - protein, 545 aa, Homo Sapiens
MMGHRPVLVLSQNTKRESGRKVQSGNINAAKTIADIIRTCLGPKSMMKMLLDPMGGIVMTNDGNAILREIQVQHPAAKSMIEISRTQDEEVGDGTTSVIILAGEMLSVAEHFLEQQMHPTVVISAYRKALDDMISTLKKISIPVDISDSDMMLNIINSSITTKAISRWSSLACNIALDAVKMVQFEENGRKEIDIKKYARVEKIPGGIIEDSCVLRGVMINKDVTHPRMRRYIKNPRIVLLDSSLEYKKGESQTDIEITREEDFTRILQMEEEYIQQLCEDIIQLKPDVVITEKGISDLAQHYLMRANITAIRRVRKTDNNRIARACGARIVSRPEELREDDVGTGAGLLEIKKIGDEYFTFITDCKDPKACTILLRGASKEILSEVERNLQDAMQVCRNVLLDPQLVPGGGASEMAVAHALTEKSKAMTGVEQWPYRAVAQALEVIPRTLIQNCGASTIRLLTSLRAKHTQENCETWGVNGETGTLVDMKELGIWEPLAVKLQTYKTAVETAVLLLRIDDIVSGHKKKGDDQSRQGGAPDAGQE

SEQ ID NO: 1349 - protein, 857 aa, Homo Sapiens
MAKAKKVGARRKASGAPAGARGGPAKANSNPFEVKVNRQKFQILGRKTRHDVGLPGVSRARALRKRTQTLLKEYKERDKSNVFRDKRFGEYNSNMSPEEKMMKRFALEQQRHHEKKSIYNLNEDEELTHYGQSLADIEKHNDIVDSDSDAEDRGTLSAELTAAHFGGGGGLLHKKTQQEGEEREKPKSRKELIEELIAKSKQEKRERQAQREDALELTEKLDQDWKEIQTLLSHKTPKSENRDKKEKPKPDAYDMMVRELGFEMKAQPSNRMKTEAELAKEEQEHLRKLEAERLRRMLGKDEDENVKKPKHMSADDLNDGFVLDKDDRRLLSYKDGKMNVEEDVQEEQSKEASDPESNEEEGDSSGGEDTEESDSPDSHLDLESNVESEEENEKPAKEQRQTPGKGLISGKERAGKATRDELPYTFAAPESYEELRSLLLGRSMEEQLLVVERIQKCNHPSLAEGNKAKLEKLFGFLLEYVGDLATDDPPDLTVIDKLVVHLYHLCQMFPESASDAIKFVLRDAMHEMEEMIETKGRAALPGLDVLIYLKITGLLFPTSDFWHPVVTPALVCLSQLLTKCPILSLQDVVKGLFVCCLFLEYVALSQRFIPELINFLLGILYIATPNKASQGSTLVHPFRALGKNSELLVVSAREDVATWQQSSLSLRWASRLRAPTSTEANHIRLSCLAVGLALLKRCVLMYGSLPSFHAIMGPLQALLTDHLADCSHPQELQELCQSTLTEMESQKQLCRPLTCEKSKPVPLKLFTPRLVKVLEFGRKQGSSKEEQERKRLIHKHKREFKGAVREIRKDNQFLARMQLSEIMERDAERKRKVKQLFNSLATQEGEWKALKRKKFKK

SEQ ID NO: 1350 - protein, 493 aa, Homo Sapiens
MLGKDYMLAIILVNCDDDLWGDHSLEVEAGLPPGWRKIHDAAGTYYWHVPSGSTQWQRPTWELGDAEDPGTGTEGIWGLRPPKGRSFSSLESSLDRSNSLSWYGGESYIQSMEPGAKCFAVRSLGWVEVPEEDLAPGKSSIAVNNCIQQLAQTRSRSQPPDGAWGEGQNMLMILKKDAMSLVNPLDHSLIHCQPLVHIRVWGVGSSKGRDSPISAPARDFAFVASDKDSCMLKCHVFCCDVPAKAIASALHGLCAQILSERVEVSGDASCCSPDPISPEDLPRQVELLDAVSQAAQKYEALYMGTLPVTKAMGMDVLNEAIGTLTARGDRNAWVPTMLSVSDSLMTAHPIQAEASTEEEPLWQCPVRLVTFIGVGRDPHTFGLIADLGRQSFQCAAFWCQPHAGGLSEAVQAACMVQYQKCLVASAARGKAWGAQARARLRLKRTSSMDSPGGPLPLPLLKGGVGGAGATPRKRGVFSFLDAFRLKPSLLHMP

SEQ ID NO: 1351 - protein, 149 aa, Homo Sapiens
MRYNEKELQALSRQPAEMAAELGMRGPKKGSVLKRRLVKLVVNFLFYFRTDEAEPVGALLLERCRVVREEPGTFSISFIEDPERKYHFECSSEEQCQEWMEALRRASYEFMRRSLIFYRNEIRKVTGKDPLEQFGISEEARFQLSGLQA

SEQ ID NO: 1352 - protein, 404 aa, Homo Sapiens
MEAGEEPLLLAELKPGRPHQFDWKSSCETWSVAFSPDGSWFAWSQGHCIVKLIPWPLEEQFIPKGFEAKSRSSKNETKGRGSPKEKTLDCGQIVWGLAFSPWPSPPSRKLWARHHPQVPDVSCLVLATGLNDGQIKIWEVQTGLLLLNLSGHQDVVRDLSFTPSGSLILVSASRDKTLRIWDLNKHGKQIQVLSGHLQWVYCCSISPDCSMLCSAAGEKSVFLWSMRSYTLIRKLEGHQSSVVSCDFSPDSALLVTASYDTNVIMWDPYTGERLRSLHHTQVDPAMDDSDVHISSLRSVCFSPEGLYLATVADDRLLRIWALELKTPIAFAPMTNGLCCTFFPHGGVIATGTRDGHVQFWTAPRVLSSLKHLCRKALRSFLTTYQVLALPIPKKMKEFLTYRTF

SEQ ID NO: 1353 - protein, 552 aa, Homo Sapiens
MLDHKDLEAEIHPLKNEERKSQENLGNPSKNEDNVKSAPPQSRLSRCRAAAFFLSLFLCLFVVFVVSFVIPCPDRPASQRMWRIDYSAAVIYDFLAVDDINGDRIQDVLFLYKNTNSSNNFSRSCVDEGFSSPCTFAAAVSGANGSTLWERPVAQDVALVECAVPQPRGSEAPSACILVGRPSSFIAVNLFTGETLWNHSSSFSGNASILSPLLQVPDVDGDGAPDLLVLTQEREEVSGHLYSGSTGHQIGLRGSLGVDGESGFLLHVTRTGAHYILFPCASSLCGCSVKGLYEKVTGSGGPFKSDPHWESMLNATTRRMLSHSSGAVRYLMHVPGNAGADVLLVGSEAFVLLDGQELTPRWTPKAAHVLRKPIFGRYKPDTLAVAVENGTGTDRQILFLDLGTGAVLCSLALPSLPGGPLSASLPTADHRSAFFFWGLHELGSTSETETGEARHSLYMFHPTLPRVLLELANVSTHIVAFDAVLFEPSRHAAYILLTGPADSEAPGLVSVIKHKVRDLVPSSRVVRLGEGGPDSDQAIRDRFSRLRYQSEA

SEQ ID NO: 1354 - protein, 180 aa, Homo Sapiens
MAALDLRAELDSLVLQLLGDLEELEGKRTVLNARVEEGWLSLAKARYAMGAKSVGPLQYASHMEPQVCLHASEAQEGLQKFKVVRAGVHAPEEVGPREAGLRRRKGPTKTPEPESSEAPQDPLNWFGILVPHSLRQAQASFRDGLQLAADIASLQNRIDWGRSQLRGLQEKLKQLEPGAA

SEQ ID NO: 1355 - protein, 154 aa, Homo Sapiens
MAAAWGSSLTAATQRAVTPWPRGRLLTASLGPQARREASSSSPEAGEGQIRLTDSCVQRLLEITEGSEFLRLQVEGGGCSGFQYKFSLDTVINPDDRVFEQGGARVVVDSDSLAFVKGAQVDFSQELIRSSFQVLNNPQAQQGCSCGSSFSIKL

SEQ ID NO: 1356 - protein, 907 aa, Homo Sapiens
MESAIAEGGASRFSASSGGGGSRGAPQHYPKTAGNSEFLGKTPGQNAQKWIPARSTRRDDNSAANNSANEKERHDAIFRKVRGILNKLTPEKFDKLCLELLNVGVESKLILKGVILLIVDKALEEPKYSSLYAQLCLRLAEDAPNFDGPAAEGQPGQKQSTTFRRLLISKLQDEFENRTRNVDVYDKRENPLLPEEEEQRAIAKIKMLGNIKFIGELGKLDLIHESILHKCIKTLLEKKKRVQLKDMGEDLECLCQIMRTVGPRLDHERAKSLMDQYFARMCSLMLSKELPARIRFLLQDTVELREHHWVPRKAFLDNGPKTINQIRQDAVKDLGVFIPAPMAQGMRSDFFLEGPFMPPRMKMDRDPLGGLADMFGQMPGSGIGTGPGVIQDRFSPTMGRHRSNQLFNGHGGHIMPPTQSQFGEMGGKFMKSQGLSQLYHNQSQGLLSQLQGQSKDMPPRFSKKGQLNADEISLRPAQSFLMNKNQVPKLQPQITMIPPSAQPPRTQTPPLGQTPQLGLKTNPPLIQEKPAKTSKKPPPSKEELLKLTETVVTEYLNSGNANEAVNGVREMRAPKHFLPEMLSKVIILSLDRSDEDKEKASSLISLLKQEGIATSDNFMQAFLNVLDQCPKLEVDIPLVKSYLAQFAARAIISELVSISELAQPLESGTHFPLFLLCLQQLAKLQDREWLTELFQQSKVNMQKMLPEIDQNKDRMLEILEGKGLSFLFPLLKLEKELLKQIKLDPSPQTIYKWIKDNISPKLHVDKGFVNILMTSFLQYISSEVNPPSDETDSSSAPSKEQLEQEKQLLLSFKPVMQKFLHDHVDLQVSALYALQVHCYNSNFPKGMLLRFFVHFYDMEIIEEEAFLAWKEDITQEFPGKGKALFQVNQWLTWLETAEEEESEEEAD

SEQ ID NO: 1357 - protein, 297 aa, Homo Sapiens
MASPQLCRALVSAQWVAEALRAPRAGQPLQLLDASWYLPKLGRDARREFEERHIPGAAFFDIDQCSDRTSPYDHMLPGAEHFAEYAGRLGVGAATHVVIYDASDQGLYSAPRVWWMFRAFGHHAVSLLDGGLRHWLRQNLPLSSGKSQPAPAEFRAQLDPAFIKTYEDIKENLESRRFQVVDSRATGRFRGTEPEPRDGIEPGHIPGTVNIPFTDFLSQEGLEKSPEEIRHLFQEKKVDLSKPLVATCGSGVTACHVALGAYLCGKPDVPIYDGSWVEWYMRARPEDVISEGRGKTH

SEQ ID NO: 1358 - protein, 377 aa, Homo Sapiens
MAAAAQSRVVRVLSMSRSAITAIATSVCHGPPCRQLHHALMPHGKGGRSSVSGIVATVFGATGFLGRYVVNHLGRMGSQVIIPYRCDKYDIMHLRPMGDLGQLLFLEWDARDKDSIRRVVQHSNVVINLIGRDWETKNFDFEDVFVKIPQAIAQLSKEAGVEKFIHVSHLNANIKSSSRYLRNKAVGEKVVRDAFPEAIIVKPSDIFGREDRFLNSFASMHRFGPIPLGSLGWKTVKQPVYVVDVSKGIVNAVKDPDANGKSFAFVGPSRYLLFHLVKYIFAVAHRLFLPFPLPLFAYRWVARVFEISPFEPWITRDKVERMHITDMKLPHLPGLEDLGIQATPLELKAIEVLRRHRTYRWLSAEIEDVKPAKTVNI

SEQ ID NO: 1359 - protein, 1178 aa, Homo Sapiens
MLKFRTVHGGLRLLGIRRTSTAPAASPNVRRLEYKPIKKVMVANRGEIAIRVFRACTELGIRTVAIYSEQDTGQMHRQKADEAYLIGRGLAPVQAYLHIPDIIKVAKENNVDAVHPGYGFLSERADFAQACQDAGVRFIGPSPEVVRKMGDKVEARAIAIAAGVPVVPGTDAPITSLHEAHEFSNTYGFPIIFKAAYGGGGRGMRVVHSYEELEENYTRAYSEALAAFGNGALFVEKFIEKPRHIEVQILGDQYGNILHLYERDCSIQRRHQKVVEIAPAAHLDPQLRTRLTSDSVKLAKQVGYENAGTVEFLVDRHGKHYFIEVNSRLQVEHTVTEEITDVDLVHAQIHVAEGRSLPDLGLRQENIRINGCAIQCRVTTEDPARSFQPDTGRIEVFRSGEGMGIRLDNASAFQGAVISPHYDSLLVKVIAHGKDHPTAATKMSRALAEFRVRGVKTNIAFLQNVLNNQQFLAGTVDTQFIDENPELFQLRPAQNRAQKLLHYLGHVMVNGPTTPIPVKASPSPTDPVVPAVPIGPPPAGFRDILLREGPEGFARAVRNHPGLLLMDTTFRDAHQSLLATRVRTHDLKKIAPYVAHNFSKLFSMENWGGATFDVAMRFLYECPWRRLQELRELIPNIPFQMLLRGANAVGYTNYPDNVVFKFCEVAKENGMDVFRVFDSLNYLPNMLLGMEAAGSAGGVVEAAISYTGDVADPSRTKYSLQYYMGLAEELVRAGTHILCIKDMAGLLKPTACTMLVSSLRDRFPDLPLHIHTHDTSGAGVAAMLACAQAGADVVDVAADSMSGMTSQPSMGALVACTRGTPLDTEVPMERVFDYSEYWEGARGLYAAFDCTATMKSGNSDVYENEIPGGQYTNLHFQAHSMGLGSKFKEVKKAYVEANQMLGDLIKVTPSSKIVGDLAQFMVQNGLSRAEAEAQAEELSFPRSVVEFLQGYIGVPHGGFPEPFRSKVLKDLPRVEGRPGASLPPLDLQALEKELVDRHGEEVTPEDVLSAAMYPDVFAHFKDFTATFGPLDSLNTRLFLQGPKIAEEFEVELERGKTLHIKALAVSDLNRAGQRQVFFELNGQLRSILVKDTQAMKEMHFHPKALKDVKGQIGAPMPGKVIDIKVVAGAKVAKGQPLCVLSAMKMETVVTSPMEGTVRKVHVTKDMTLEGDDLILEIE

SEQ ID NO: 1360 - protein, 664 aa, Homo Sapiens
MSGVRGLSRLLSARRLALAKAWPTVLQTGTRGFHFTVDGNKRASAKVSDSISAQYPVVDHEFDAVVVGAGGAGLRAAFGLSEAGFNTACVTKLFPTRSHTVAAQGGINAALGNMEEDNWRWHFYDTVKGSDWLGDQDAIHYMTEQAPAAVVELENYGMPFSRTEDGKIYQRAFGGQSLKFGKGGQAHRCCCVADRTGHSLLHTLYGRSLRYDTSYFVEYFALDLLMENGECRGVIALCIEDGSIHRIRAKNTVVATGGYGRTYFSCTSAHTSTGDGTAMITRAGLPCQDLEFVQFHPTGIYGAGCLITEGCRGEGGILINSQGERFMERYAPVAKDLASRDVVSRSMTLEIREGRGCGPEKDHVYLQLHHLPPEQLATRLPGISETAMIFAGVDVTKEPIPVLPTVHYNMGGIPTNYKGQVLRHVNGQDQIVPGLYACGEAACASVHGANRLGANSLLDLVVFGRACALSIEESCRPGDKVPPIKPNAGEESVMNLDKLRFADGSIRTSELRLSMQKSMQNHAAVFRVGSVLQEGCGKISKLYGDLKHLKTFDRGMVWNTDLVETLELQNLMLCALQTIYGAEARKESRGAHAREDYKVRIDEYDYSKPIQGQQKKPFEEHWRKHTLSYVDVGTGKVTLEYRPVIDKTLNEADCATVPPAIRSY

SEQ ID NO: 1361 - protein, 172 aa, Homo Sapiens
MSSSGGAPGASASSAPPAQEEGMTWWYRWLCRLSGVLGAVSCAISGLFNCITIHPLNIAAGVWMIMNAFILLLCEAPFCCQFIEFANTVAEKVDRLRSWQKAVFYCGMAVVPIVISLTLTTLLGNAIAFATGVLYGLSALGKKGDAISYARIQQQRQQADEEKLAETLEGEL

SEQ ID NO: 1362 - protein, 618 aa, Homo Sapiens
MELLAAAFSAACAVDHDSSTSESDARDSAAGHLPGSESSSTPGNGATPEEWPALADSPTTLTEALRMIHPIPADSWRNLIEQIGLLYQEYRDKSTLQEIETRRQQDAEIEDNTNGSPASEDTPEEEEEEEEEEEPASPPERKTLPQICLLSNPHSRFNLWQDLPEIRSSGVLEILQPEEIKLQEAMFELVTSEASYYKSLNLLVSHFMENERIRKILHPSEAHILFSNVLDVLAVSERFLLELEHRMEENIVISDVCDIVYRYAADHFSVYITYVSNQTYQERTYKQLLQEKAAFRELIAQLELDPKCRGLPFSSFLILPFQRITRLKLLVQNILKRVEERSERECTALDAHKELEMVVKACNEGVRKMSRTEQMISIQKKMEFKIKSVPIISHSRWLLKQGELQQMSGPKTSRTLRTKKLFHEIYLFLFNDLLVICRQIPGDKYQVFDSAPRGLLRVEELEDQGQTLANVFILRLLENADDREATYMLKASSQSEMKRWMTSLAPNRRTKFVSFTSRLLDCPQVQCVHPYVAQQPDELTLELADILNILDKTDDGWIFGERLHDQERGWFPSSMTEEILNPKIRSQNLKECFRVHKMDDPQRSQNKDRRKLGSRNRQ

SEQ ID NO: 1363 - protein, 226 aa, Homo Sapiens
METVVIVAIGVLATIFLASFAALVLVCRQRYCRPRDLLQRYDSKPIVDLIGAMETQSEPSELELDDVVITNPHIEAILENEDWIEDASGLMSHCIAILKICHTLTEKLVAMTMGSGAKMKTSASVSDIIVVAKRISPRVDDVVKSMYPPLDPKLLDARTTALLLSVSHLVLVTRNACHLTGGLDWIDQSLSAAEEHLEVLREAALASEPDKGLPGPEGFLQEQSAI

SEQ ID NO: 1364 - protein, 1235 aa, Homo Sapiens
MDGPTRGHGLRKKRRSRSQRDRERRSRGGLGAGAAGGGGAGRTRALSLASSSGSDKEDNGKPPSSAPSRPRPPRRKRRESTSAEEDIIDGFAMTSFVTFEALEKDVALKPQERVEKRQTPLTKKKREALTNGLSFHSKKSRLSHPHHYSSDRENDRNLCQHLGKRKKMPKALRQLKPGQNSCRDSDSESASGESKGFHRSSSRERLSDSSAPSSLGTGYFCDSDSDQEEKASDASSEKLFNTVIVNKDPELGVGTLPEHDSQDAGPIVPKISGLERSQEKSQDCCKEPIFEPVVLKDPCPQVAQPIPQPQTEPQLRAPSPDPDLVQRTEAPPQPPPLSTQPPQGPPEAQLQPAPQPQVQRPPRPQSPTQLLHQNLPPVQAHPSAQSLSQPLSAYNSSSLSLNSLSSSRSSTPAKTQPAPPHISHHPSASPFPLSLPNHSPLHSFTPTLQPPAHSHHPNMFAPPTALPPPPPLTSGSLQVAGHPAGSTYSEQDILRQELNTRFLASQSADRGASLGPPPYLRTEFHQHQHQHQHTHQHTHQHTFTPFPHAIPPTAIMPTPAPPMFDKYPTKVDPFYRHSLFHSYPPAVSGIPPMIPPTGPFGSLQGAFQPKLTDPFRPMLRKPGKWCAMHVHIAWQIYHHQQKVKKQMQSDPHKLDFGLKPEFLSRPPGPSLFGAIHHPHDLARPSTLFSAAGAAHPTGTPFGPPPHHSNFLNPAAHLEPFNRPSTFTGLAAVGGNAFGGLGNPSVTPNSMFGHKDGPSVQNFSNPHEPWNRLHRTPPSFPTPPPWLKPGELERSASAAAHDRDRDVDKRDSSVSKDDKERESVEKRHSSHPSPAPVLPVNALGHTRSSTEQIRAHLNTEAREKDKPKERERDHSESRKDLAADEHKAKEGHLPEKDGHGHEGRAAGEEAKQLARVPSPYVRTPVVESARPNSTSSREAEPRKGEPAYENPKKSSEVKVKEERKEDHDLPPEAPQTHRASEPPPPNSSSSVHPGPLASMPMTVGVTGIHPMNSISSLDRTRMMTPFMGISPLPGGERFPYPSFHWDPIRDPLRDPYRELDIHRRDPLGRDFLLRNDPLHRLSTPRLYEADRSFRDREPHDYSHHHHHHHHPLSVDPRREHERGGHLDERERLHMLREDYEHTRLHSVHPASLDGHLPHPSLITPGLPSMHYPRISPTAGNQNGLLNKTPPTAALSAPPPLISTLGGRPVSPRRTTPLSAEIRERPPSHTLKDIEAR

SEQ ID NO: 1365 - protein, 224 aa, Homo Sapiens
MAPPAAPGRDRVGREDEDGWETRGDRKARKPLVEKKRRARINESLQELRLLLAGAEVQAKLENAEVLELTVRRVQGVLRGRAREREQLQAEASERFAAGYIQCMHEVHTFVSTCQAIDATVAAELLNHLLESMPLREGSSFQDLLGDALAGPPRAPGRSGWPAGGAPGSPIPSPPGPGDDLCSDLEEAPEAELSQAPAEGPDLVPAALGSLTTAQIARSVWRPW

SEQ ID NO: 1366 - protein, 221 aa, Homo Sapiens
MAGGVLPLRGLRALCRVLLFLSQFCILSGGESTEIPPYVMKCPSNGLCSRLPADCIDCTTNFSCTYGKPVTFDCAVKPSVTCVDQDFKSQKNFIINMTCRFCWQLPETDYECTNSTSCMTVSCPRQRYPANCTVRDHVHCLGNRTFPKMLYCNWTGGYKWSTALALSITLGGFGADRFYLGQWREGLGKLFSFGGLGIWTLIDVLLIGVGYVGPADGSLYI

SEQ ID NO: 1367 - protein, 876 aa, Homo Sapiens
MGPEALSSLLLLLLVASGDADMKGHFDPAKCRYALGMQDRTIPDSDISASSSWSDSTAARHSRLESSDGDGAWCPAGSVFPKEEEYLQVDLQRLHLVALVGTQGRHAGGLGKEFSRSYRLRYSRDGRRWMGWKDRWGQEVISGNEDPEGVVLKDLGPPMVARLVRFYPRADRVMSVCLRVELYGCLWRDGLLSYTAPVGQTMYLSEAVYLNDSTYDGHTVGGLQYGGLGQLADGVVGLDDFRKSQELRVWPGYDYVGWSNHSFSSGYVEMEFEFDRLRAFQAMQVHCNNMHTLGARLPGGVECRFRRGPAMAWEGEPMRHNLGGNLGDPRARAVSVPLGGRVARFLQCRFLFAGPWLLFSEISFISDVVNNSSPALGGTFPPAPWWPPGPPPTNFSSLELEPRGQQPVAKAEGSPTAILIGCLVAIILLLLLIIALMLWRLHWRRLLSKAERRVLEEELTVHLSVPGDTILINNRPGPREPPPYQEPRPRGNPPHSAPCVPNGSAYSGDYMEPEKPGAPLLPPPPQNSVPHYAEADIVTLQGVTGGNTYAVPALPPGAVGDGPPRVDFPRSRLRFKEKLGEGQFGEVHLCEVDSPQDLVSLDFPLNVRKGHPLLVAVKILRPDATKNARNDFLKEVKIMSRLKDPNIIRLLGVCVQDDPLCMITDYMENGDLNQFLSAHQLEDKAAEGAPGDGQAAQGPTISYPMLLHVAAQIASGMRYLATLNFVHRDLATRNCLVGENFTIKIADFGMSRNLYAGDYYRVQGRAVLPIRWMAWECILMGKFTTASDVWAFGVTLWEVLMLCRAQPFGQLTDEQVIENAGEFFRDQGRQVYLSRPPACPQGLYELMLRCWSRESEQRPPFSQLHRFLAEDALNTV

SEQ ID NO: 1368 - protein, 464 aa, Homo Sapiens
METEQPEETFPNTETNGEFGKRPAEDMEEEQAFKRSRNTDEMVELRILLQSKNAGAVIGKGGKNIKALRTDYNASVSVPDSSGPERILSISADIETIGEILKKIIPTLEEGLQLPSPTATSQLPLESDAVECLNYQHYKGSDFDCELRLLIHQSLAGGIIGVKGAKIKELRENTQTTIKLFQECCPHSTDRVVLIGGKPDRVVECIKIILDLISESPIKGRAQPYDPNFYDETYDYGGFTMMFDDRRGRPVGFPMRGRGGFDRMPPGRGGRPMPPSRRDYDDMSPRRGPPPPPPGRGGRGGSRARNLPLPPPPPPRGGDLMAYDRRGRPGDRYDGMVGFSADETWDSAIDTWSPSEWQMAYEPQGGSGYDYSYAGGRGSYGDLGGPIITTQVTIPKDLAGSIIGKGGQRIKQIRHESGASIKIDEPLEGSEDRIITITGTQDQIQNAQYLLQNSVKQYADVEGF

SEQ ID NO: 1369 - protein, 738 aa, Homo Sapiens
MQPRWAQGATMWLGVLLTLLLCSSLEGQENSFTINSVDMKSLPDWTVQNGKNLTLQCFADVSTTSHVKPQHQMLFYKDDVLFYNISSMKSTESYFIPEVRIYDSGTYKCTVIVNNKEKTTAEYQVLVEGVPSPRVTLDKKEAIQGGIVRVNCSVPEEKAPIHFTIEKLELNEKMVKLKREKNSRDQNFVILEFPVEEQDRVLSFRCQARIISGIHMQTSESTKSELVTVTESFSTPKFHISPTGMIMEGAQLHIKCTIQVTHLAQEFPEIIIQKDKAIVAHNRHGNKAVYSVMAMVEHSGNYTCKVESSRISKVSSIVVNITELFSKPELESSFTHLDQGERLNLSCSIPGAPPANFTIQKEDTIVSQTQDFTKIASKSDSGTYICTAGIDKVVKKSNTVQIVVCEMLSQPRISYDAQFEVIKGQTIEVRCESISGTLPISYQLLKTSKVLENSTKNSNDPAVFKDNPTEDVEYQCVADNCHSHAKMLSEVLRVKVIAPVDEVQISILSSKVVESGEDIVLQCAVNEGSGPITYKFYREKEGKPFYQMTSNATQAFWTKQKASKEQEGEYYCTAFNRANHASSVPRSKILTVRVILAPWKKGLIAVVIIGVIIALLIIAAKCYFLRKAKAKQMPVEMSRPAVPLLNSNNEKMSDPNMEANSHYGHNDDVRNHAMKPINDNKEPLNSDVQYTEVQVSSAESHKDLGKKDTETVYSEVRKAVPDAVESRYSRTEGSLDGT

SEQ ID NO: 1370 - protein, 324 aa, Homo Sapiens
MPELAVQKVVVHPLVLLSVVDHFNRIGKVGNQKRVVGVLLGSWQKKVLDVSNSFAVPFDEDDKDDSVWFLDHDYLENMYGMFKKVNARERIVGWYHTGPKLHKNDIAINELMKRYCPNSVLVIIDVKPKDLGLPTEAYISVEEVHDDGTPTSKTFEHVTSEIGAEEAEEVGVEHLLRDIKDTTVGTLSQRITNQVHGLKGLNSKLLDIRSYLEKVATGKLPINHQIIYQLQDVFNLLPDVSLQEFVKAFYLKTNDQMVVVYLASLIRSVVALHNLINNKIANRDAEKKEGQEKEESKKDRKEDKEKDKDKEKSDVKKEEKKEKK

SEQ ID NO: 1371 - protein, 249 aa, Homo Sapiens
MAMLRVQPEAQAKVDVFREDLCTKTENLLGSYFPKKISELDAFLKEPALNEANLSNLKAPLDIPVPDPVKEKEKEERKKQQEKEDKDEKKKGEDEDKGPPCGPVNCNEKIVVLLQRLKPEIKDVIEQLNLVTTWLQLQIPRIEDGNNFGVAVQEKVFELMTSLHTKLEGFHTQISKYFSERGDAVTKAAKQPHVGDYRQLVHELDEAEYRDIRLMVMEIRNAYAVLYDIILKNFEKLKKPRGETKGMIY

SEQ ID NO: 1372 - protein, 97 aa, Homo Sapiens [sequence omitted]

SEQ ID NO: 1373 - protein, 84 aa, Homo Sapiens
MPLAKDLLHPSPEEEKRKHKKKRLVQSPNSYFMDVKCPGCYKITTVFSHAQTVVLCVGCSTVLCQPTGGKARLTEGCSFRRKQH

SEQ ID NO: 1374 - protein, 556 aa, Homo Sapiens
MAREKEMQEFTRSFFRGRPDLSTLTHSIVRRRYLAHSGRSHLEPEEKQALKRLVEEELLKMQVDEAASREDKLDLTKKGKRPPTPCSDPERKRFRFNSESESGSEASSPDYFGPPAKNGVAAEVSPAKEENPRRASKAVEESSDEERQRDLPAQRGEESSEEEEKGYKGKTRKKPVVKKQAPGKASVSRKQAREESEESEAEPVQRTAKKVEGNKGTKSLKESEQESEEEILAQKKEQREEEVEEEEKEEDEEKGDWKPRTRSNGRRKSAREERSCKQKSQAKRLLGDSDSEEEQKEAASSGDDSGRDREPPVQRKSEDRTQLKGGKRLSGSSEDEEDSGKGEPTAKGSRKMARLGSTSGEESDLEREVSDSEAGGGPQGERKNRSSKKSSRKGRTRSSSSSSDGSPEAKGGKAGSGRRGEDHPAVMRLKRYIRACGAHRNYKKLLGSCCSHKERLSILRAELEALGMKGTPSLGKCRALKEQREEAAEVASLDVANIISGSGRPRRRTAWNPLGEAAPPGELYRRTLDSDEERPRPAPPDWSHMRGIISSDGESN

SEQ ID NO: 1375 - protein, 1170 aa, Homo Sapiens
MNMFLYFQTIIKEGMLTKQNNSFQRSKRRYFKLRGRTLYYAKTAKSIIFDEVDLTDASVAESSTKNVNNSFTVITPCRKLILCADNRKEMEDWIAALKTVQNREHFEPTQYSMDHFSGMHNWYACSHARPTYCNVCREALSGVTSHGLSCEVCKFKAHKRCAVRATNNCKWTTLASIGKDIIEDADGIAMPHQWLEGNLPVSAKCTVCDKTCGSVLRLQDWRCLWCKAMVHTSCKESLLTKCPLGLCKVSVIPPTALNSIDSDGFWKASCPPSCTSPLLVFVNSKSGDNQGVKFLRRFKQLLNPAQVFDLMNGGPHLGLRLFQKFDTFRILVCGGDGSVGWVLSEIDSLNLHKQCQLGVLPLGTGNDLARVLGWGSACDDDTQLPQILEKLERASTKMLDRWSVMAYEAKLPRQASSSTVTEDFSEDSEVQQILFYEDSVAAHLSKILTSDQHSVVISSAKVLCETVKDFVARVGKAYEKTTESSEESEVMAKKCSVLKEKLDSLLKTLDDESQASSSLPNPPPTIAEEAEDGDGSGSICGSTGDRLVASACPARPQIFRPREQLMLRANSLKKAIRQIIEHTEKAVDEQNAQTQEQEGFVLGLSESEEKMDHRVCPPLSHSESFGVPKGRSQRKVSKSPCEKLISKGSLSLGSSASLPPQPGSRDGLPALNTKILYPNVRAGMSGSLPGGSVISRLLINADPFNSEPETLEYYTEKCVMNNYFGIGLDAKISLDFNNKRDEHPEKCRSRTKNMMWYGVLGTKELLHRTYKNLEQKVLLECDGRPIPLPSLQGIAVLNIPSYAGGTNFWGGTKEDDTFAAPSFDDKILEVVAVFGSMQMAVSRVIRLQHHRIAQCRTVKISILGDEGVPVQVDGEAWVQPPGYIRIVHKNRAQTLTRDRAFESTLKSWEDKQKCELPRPPSCSLHPEMLSEEEATQMDQFGQAAGVLIHSIREIAQSHRDMEQELAHAVNASSKSMDRVYGKPRTTEGLNCSFVLEMVNNFRALRSETELLLSGKMALQLDPPQKEQLGSALAEMDRQLRRLADTPWLCQSAEPGDEESVMLDLAKRSRSGKFRLVTKFKKEKNNKNKEAHSSLGAPVHLWGTEEVAAWLEHLSLCEYKDIFTRHDIRGSELLHLERRDLKDLGVTKVGHMKRILCGIKELSRSAPAVEA

SEQ ID NO: 1376 - protein, 353 aa, Homo Sapiens
MAMTLLEDWCRGMDVNSQRALLVWGIPVNCDEAEIEETLQAAMPQVSYRMLGRMFWREENAKAALLELTGAVDYAAIPREMPGKGGVWKVLFKPPTSDAEFLERLHLFLAREGWTVQDVARVLGFQNPTPTPGPEMPAEMLNYILDNVIQPLVESIWYKRLTLFSGRDIPGPGEETFDPWLEHTNEVLEEWQVSDVEKRRRLMESLRGPAADVIRILKSNNPAITTAECLKALEQVFGSVESSRDAQIKFLNTYQNPGEKLSAYVIRLEPLLQKVVEKGAIDKDNVNQARLEQVIAGANHSGAIRRQLWLTGAGEGPAPNLFQLLVQIREEEAKEEEEEAEATLLQLGLEGHF

SEQ ID NO: 1377 - protein, 2235 aa, Homo Sapiens
MPLFFSALLVLLLVALSALFLGRWLVVRLATKWCQRKLQAELKIGSFRFFWIQNVSLKFQQHQQTVEIDNLWISSKLLSHDLPHYVALCFGEVRIRTDLQKVSDLSAPFSQSAGVDQKELSFSPSLLKIFCQLFSIHVDAINIMVLKVDTSESLWHIQISRSRFLLDSDGKRLICEVSLCKINSKVLKSGQLEDTCLVELSLALDLCLKVGISSRHLTAITVDVWTLHAELHEGLFQSQLLCQGPSLASKPVPCSEVTENLVEPTLPGLFLLQQLPDQVKVKMENTSVVLSMNSQKRHLTWTLKLLQFLYHRDEDQLPLRSFTANSDMAQMSTELLLEDGLLLSQSRQRIVCLNSLKASVQVTTIDLSASLVLNTCIIHYRHQEFSHWLHLLALETQGSSSPVLKQRKKRTFPQILAPIIFSTSISNVNISIQLGDTPPFALGFNSISLDYQHLRPQSIHQRGVLTVDHLCWRVGSDSHIQRAPHPPNMHVWGEALVLDSFTLQGSYNQPLGLSSTQSDTLFLDCTIRGLQVEASDTCAQCLSRILSLMGPQSGKSAVSRHSSFGESVSLLWKVDLKVEDMNLFTLSALVGASEVRLDTLTILGSAETSTVGIQGLVLALVKSVTEKMQPCCKAPDIPTPVLSLSMLSITYHSSIRSLEVQCGAGLTLLWSPPDHMYLYQHVLATLQCRDLLRATVFPETVPSLALETSGTTSELEGRAPEPLPPKRLLNLTLEVSTAKLTAFVAEDKFITLAAESVSLSRHGGSLQAYCPELAAGFDGNSIFNFKEVEVQLLPELEEMILHRNPFPALQTLRNRVWLLSFGSVSVEFPYQYDFSRTLDEAVGVQKWLKGLHQGTRAWASPSPVPLPPDLLLKVEHFSWVFLDDVFEVKLHDNYELMKDESKESAKRLQLLDAKVAALRKQHGELLPARKIEELYASLERKNIEIYIQRSRRLYGNTPMRRALLTWSLAGLELVALADASFHGPEHVVEQVQELDPGSPFPPEGLDLVIQWCRMLKCNVKSFLVRIRDYPRYLFEIRDWRLMGRLVGTEQSGQPCSRRRQILHLGLPWGNVAVERNMPPLKFYHDFHSEIFQYTVVWGPCWDPAWTLIGQCVDLLTKPSADPSPPLPWWDKSRLLFHGDWHMDIEQANLHQLATEDPYNTTENMHWEWSHLSFHWKPGQFVFKGDLDINVRTASKYDDCCFLHLPDLCMTLDLQWLCHGNPHDHHSVTLRAPEFLPEVPLGQLHDSYRAFRSENLNLSIKMDLTRHSGTISQPRILLYSSTLRWMQNFWATWTSVTRPICRGKLFNNLKPSKKKLGQHYKQLSYTALFPQLQVHYWASFAQQRGIQIECSQGHVFTRGTQRLIPQAGTVMRRLISDWSVTQMVSDLSQVTVHLMASPTEENADHCLDPLVTKTHLLSLSSLTYQRHSNRTAEEELSARDGDPTFHTHQLHLVDLRISWTTTNRDIAFGLYDGYKKAAVLKRNLSTEALKGLKIDPQMPAKKPKRGVPTSASAPPRVNTPSFSGQPDKGSSGGAYMLQKLIEETDRFVVFTEEESGMSDQLCGIAACQTDDIYNRNCLIELVNCQMVLRGAETEGCVIVSAAKAQLLQCQHHPAWYGDTLKQKTSWTCLLDGMQYFATTESSPTEQDGRQLWLEVKNIEEHRQRSLDSVQELMESGQAVGGMVTTTTDWNQPAEAQQAQQVQRIISRCNCRMYYISYSHDIDPELATQIKPPEVLENQEKEDLLKKQEGAVDTFTLIHHELEISTNPAQYAMILDIVNNLLLHVEPKRKEHSEKKQRVRFQLEISSNPEEQRSSILHLQEAVRQHVAQIRQLEKQMYSIMKSLQDDSKNENLLDLNQKLQLQLNQEKANLQLESEELNILIRCFKDFQLQRANKMELRKQQEDVSVVRRTEFYFAQARWRLTEEDGQLGIAELELQRFLYSKVNKSDDTAEHLLELGWFTMNNLLPNAVYKVVLRPQSSCQSGRQLALRLFSKVRPPVGGISVKEHFEVNVVPLTIQLTHQFFHRMMGFFFPGRSVEDDEVGDEEDKSKLVTTGIPVVKPRQLIATDDAVPLGPGKGVAQGLTRSSGVRRSFRKSPEHPVDDIDKMKERAAMNNSFIYIKIPQVPLCVSYKGEKNSVDWGDLNLVLPCLEYHNNTWTWLDFAMAVKRDSRKALVAQVIKEKLRLKSATGSEVRGKLETKSDLNMQQQEEEEKARLLIGLSVGDKNPGKKSIFGRRK

SEQ ID NO: 1378 - protein, 818 aa, Homo Sapiens
MKKQFNRMRQLANQTVGRAEKTEVLSEDLLQVEKRLELVKQVSHSTHKKLTACLQGQQGAEADKRSKKLPLTTLAQCLMEGSAILGDDTLLGKMLKLCGETEDKLAQELIHFELQVERDVIEPLFLLAEVEIPNIQKQRKHLAKLVLDMDSSRTRWQQTSKSSGLSSSLQPAGAKADALREEMEEAANRVEICRDQLSADMYSFVAKEIDYANYFQTLIEVQAEYHRKSLTLLQAVLPQIKAQQEAWVEKPSFGKPLEEHLTISGREIAFPIEACVTMLLECGMQEEGLFRVAPSASKLKKLKAALDCCVVDVQEYSADPHAIAGALKSYLRELPEPLMTFELYDEWIQASNVQEQDKKLQALWNACEKLPKANHNNIRYLIKFLSKLSEYQDVNKMTPSNMAIVLGPNLLWPQAEGNITEMMTTVSLQIVGIIEPIIQHADWFFPGEIEFNITGNYGSPVHVNHNANYSSMPSPDMDPADRRQPEQARRPLSVATDNMMLEFYKKDGLRKIQSMGVRVMDTNWVARRGSSAGRKVSCAPPSMQPPAPPAELAAPLPSPLPEQPLDSPAAPALSPSGLGLQPGPERTSTTKSKELSPGSAQKGSPGSSQGTACAGTQPGAQPGAQPGASPSPSQPPADQSPHTLRKVSKKLAPIPPKVPFGQPGAMADQSAGQPSPVSLSPTPPSTPSPYGLSYPQGYSLASGQLSPAAAPPLASPSVFTSTLSKSRPTPKPRQRPTLPPPQPPTVNLSASSPQSTEAPMLDGMSPGESMSTDLVHFDIPSIHIELGSTLRLSPLEHMRRHSVTDKRDSEEESESTAL

SEQ ID NO: 1379 - protein, 456 aa, Homo Sapiens
MARWPAPPPPPPPPPPLAAPPPPGASAKGPPARKLLFMCTLSLSVTYLCYSLLGGSGSLQFPLALQESPGAAAEPPPSPPPPSLLPTPVRLGAPSQPPAPPPLDNASHGEPPEPPEQPAAPGTDGWGLPSGGGGAQDAWLRTPLAPSEMITAQSALPEREAQESSTTDEDLAGRRAANGSSERGGAVSTPDYGEKKLPQALIIGVKKGGTRALLEAIRVHPDVRAVGVEPHFFDRNYEKGLEWYRNVMPKTLDGQITMEKTPSYFVTNEAPKRIHSMAKDIKLIVVVRNPVTRAISDYTQTLSKKPEIPTFEVLAFKNRTLGLIDASWSAIRIGIYALHLENWLQYFPLSQILFVSGERLIVDPAGEMAKVQDFLGLKRVVTEKHFYFNKTKGFPCLKKPEDSSAPRCLGKSKGRTHPRIDPDVIHRLRKFYKPFNLMFYQMTGQDFQWEQEEGDK

SEQ ID NO: 1380 - protein, 350 aa, Homo Sapiens
MAAAGPAAGPTGPEPMPSYAQLVQRGWGSALAAARGCTDCGWGLARRGLAEHAHLAPPELLLLALGALGWTALRSAATARLFRPLAKRCCLQPRDAAKMPESAWKFLFYLGSWSYSAYLLFGTDYPFFHDPPSVFYDWTPGMAVPRDIAAAYLLQGSFYGHSIYATLYMDTWRKDSVVMLLHHVVTLILIVSSYAFRYHNVGILVLFLHDISDVQLEFTKLNIYFKSRGGSYHRLHALAADLGCLSFGFSWFWFRLYWFPLKVLYATSHCSLRTVPDIPFYFFFNALLLLLTLMNLYWFLYIVAFAAKVLTGQVHELKDLREYDTAEAQSLKPSKAEKPLRNGLVKDKRF

SEQ ID NO: 1381 - protein, 725 aa, Homo Sapiens
MAMDSSLQARLFPGLAIKIQRSNGLIHSANVRTVNLEKSCVSVEWAEGGATKGKEIDFDDVAAINPELLQLLPLHPKDNLPLQENVTIQKQKRRSVNSKIPAPKESLRSRSTRMSTVSELRITAQENDMEVELPAAANSRKQFSVPPAPTRPSCPAVAEIPLRMVSEEMEEQVHSIRGSSSANPVNSVRRKSCLVKEVEKMKNKREEKKAQNSEMRMKRAQEYDSSFPNWEFARMIKEFRATLECHPLTMTDPIEEHRICVCVRKRPLNKQELAKKEIDVISIPSKCLLLVHEPKLKVDLTKYLENQAFCFDFAFDETASNEVVYRFTARPLVQTIFEGGKATCFAYGQTGSGKTHTMGGDLSGKAQNASKGIYAMASRDVFLLKNQPCYRKLGLEVYVTFFEIYNGKLFDLLNKKAKLRVLEDGKQQVQVVGLQEHLVNSADDVIKMIDMGSACRTSGQTFANSNSSRSHACFQIILRAKGRMHGKFSLVDLAGNERGADTSSADRQTRMEGAEINKSLLALKECIRALGQNKAHTPFRESKLTQVLRDSFIGENSRTCMIATISPGISSCEYTLNTLRYADRVKELSPHSGPSGEQLIQMETEEMEACSNGALIPGNLSKEEEELSSQMSSFNEAMTQIRELEEKAMEELKEIIQQGPDWLELSEMTEQPDYDLETFVNKAESALAQQAKHFSALRDVIKALRLAMQLEEQASRQISSKKRPQ

SEQ ID NO: 1382 - protein, 294 aa, Homo Sapiens
MEYPAPATVQAADGGAAGPYSSSELLEGQEPDGVRFDRERARRLWEAVSGAQPVGREEVEHMIQKNQCLFTNTQCKVCCALLISESQKLAHYQSKKHANKVKRYLAIHGMETLKGETKKLDSDQKSSRSKDKNQCCPICNMTFSSPVVAQSHYLGKTHAKNLKLKQQSTKVEALHQNREMIDPDKFCSLCHATFNDPVMAQQHYVGKKHRKQETKLKLMARYGRLADPAVTDFPAGKGYPCKTCKIVLNSIEQYQAHVSGFKHKNQSPKTVASSLGQIPMQRQPIQKDSTTLED

SEQ ID NO: 1383 - protein, 796 aa, Homo Sapiens
MPTTQQSPQDEQEKLLDEAIQAVKVQSFQMKRCLDKNKLMDALKHASNMLGELRTSMLSPKSYYELYMAISDELHYLEVYLTDEFAKGRKVADLYELVQYAGNIIPRLYLLITVGVVYVKSFPQSRKDILKDLVEMCRGVQHPLRGLFLRNYLLQCTRNILPDEGEPTDEETTGDISDSMDFVLLNFAEMNKLWVRMQHQGHSRDREKRERERQELRILVGTNLVRLSQLEGVNVERYKQIVLTGILEQVVNCRDALAQEYLMECIIQVFPDEFHLQTLNPFLRACAELHQNVNVKNIIIALIDRLALFAHREDGPGIPADIKLFDIFSQQVATVIQSRQDMPSEDVVSLQVSLINLAMKCYPDRVDYVDKVLETTVEIFNKLNLEHIATSSAVSKELTRLLKIPVDTYNNILTVLKLKHFHPLFEYFDYESRKSMSCYVLSNVLDYNTEIVSQDQVDSIMNLVSTLIQDQPDQPVEDPDPEDFADEQSLVGRFIHLLRSEDPDQQYLILNTARKHFGAGGNQRIRFTLPPLVFAAYQLAFRYKENSKVDDKWEKKCQKIFSFAHQTISALIKAELAELPLRLFLQGALAAGEIGFENHETVAYEFMSQAFSLYEDEISDSKAQLAAITLIIGTFERMKCFSEENHEPLRTQCALAASKLLKKPDQGRAVSTCAHLFWSGRNTDKNGEELHGGKRVMECLKKALKIANQCMDPSLQVQLFIEILNRYIYFYEKENDAVTIQVLNQLIQKIREDLPNLESSEETEQINKHFHNTLEHLRLRRESPESEGPIYEGLIL

SEQ ID NO: 1384 - protein, 695 aa, Homo Sapiens
MDCYTANWNPLGDSAFYRKYELYSMDWDLKEELRDCLVAAAPYGGPIALLRNPWRKEKAASVRPVLDIYSASGMPLASLLWKSGPVVSLGWSAEEELLCVQEDGAVLVYGLHGDFRRHFSMGNEVLQNRVLDARIFHTEFGSGVAILTGAHRFTLSANVGDLKLRRMPEVPGLQSAPSCWTVLCQDRVAHILLAVGPDLYLLDHAACSAVTPPGLAPGVSSFLQMAVSFTYRHLALFTDTGYIWMGTASLKEKLCEFNCNIRAPPKQMVWCSRPRSKERAVVVAWERRLMVVGDAPESIQYKQLTIQVLLDRLVLRRLYPLAIQICEYLRLPEVQGVSRILAHWACYKVQQKDVSDEDVARAINQKLGDTPGVSYSDIAARAYGCGRTELAIKLLEYEPRSGEQVPLLLKMKRSKLALSKAIESGDTDLVFTVLLHLKNELNRGDFFMTLRNQPMALSLYRQFCKHQELETLKDLYNQDDNHQELGSFHIRASYAAEERIEGRVAALQTAADAFYKAKNEFAAKATEDQMRLLRLQRRLEDELGGQFLDLSLHDTVTTLILGGHNKRAEQLARDFRIPDKRLWWLKLTALADLEDWEELEKFSKSKKSPIGYLPFVEICMKQHNKYEAKKYASRVGPEQKVKALLLVGDVAQAADVAIEHRNEAELSLVLSHCTGATDGATADKIQRARAQAQKK

SEQ ID NO: 1385 - protein, 133 aa, Homo Sapiens
MLSPEAERVLRYLVEVEELAEEVLADKRQIVDLDTKRNQNREGLRALQKDLSLSEDVMVCFGNMFIKMPHPETKEMIEKDQDHLDKEIEKLRKQLKVKVNRLFEAQGKPELKGFNLNPLNQDELKALKVILKG

SEQ ID NO: 1386 - protein, 842 aa, Homo Sapiens
MDFQERDPPFLPESAQSSKPSSAQQASELWEVVEEPRVRLGTEGVMPERQEGHLLKKRKWPLKGWHKRYFVLEDGILHYATTRQDITKGKLHGSIDVRLSVMSINKKAQRIDLDTEDNIYHLKIKSQDLFQSWVAQLRAHRLAHRLDMPRGSLPSTAHRKVPGAQLPTAATASALPGLGPREKVSSWLRDSDGLDRCSHELSECQGKLQELHRLLQSLESLHRIPSAPVIPTHQASVTTERPKKGKRTSRMWCTQSFAKDDTIGRVGRLHGSVPNLSRYLESRDSSGTRGLPPTDYAHLQRSFWALAQKVHSSLSSVLAALTMERDQLRDMHQGSELSRMGVSEASTGQRRLHSLSTSSDTTADSFSSLNPEEQEALYMKGRELTPQLSQTSILSLADSHTEFFDACEVLLSASSSENEGSEEEESCTSEITTSLSEEMLDLRGAERCQKGGCVPGRPMGPPRRRCLPAASGPGADVSLWNILRNNIGKDLSKVSMPVQLNEPLNTLQRLCEELEYSSLLDQASRIADPCERMVYIAAFAVSAYSSTYHRAGCKPFNPVLGETYECERPDRGFRFISEQVSHHPPISACHAESENFAFWQDMKWKNKFWGKSLEIVPVGTVNVSLPRFGDHFEWNKVTSCIHNVLSGQRWIEHYGEVLIRNTQDSSCHCKITFCKAKYWSSNVHEVQGAVLSRSGRVLHRLFGKWHEGLYRGPTPGGQCIWKPNSMPPDHERNFGFTQFALELNELTAELKRSLPSTDTRLRPDQRYLEEGNIQAAEAQKRRIEQLQRDRRKVMEENNIVHQARFFRRQTDSSGKEWWVTNNTYWRLRAEPGYGNMDGAVLW

SEQ ID NO: 1387 - protein, 303 aa, Homo Sapiens
MALDFLAGCAGGVAGVLVGHPFDTVKVRLQVQSVEKPQYRGTLHCFKSIIKQESVLGLYKGLGSPLMGLTFINALVFGVQGNTLRALGHDSPLNQFLAGAAAGAIQCVICCPMELAKTRLQLQDAGPARTYKGSLDCLAQIYGHEGLRGVNRGMVSTLLRETPSFGVYFLTYDALTRALGCEPGDRLLVPKLLLAGGTSGIVSWLSTYPVDVVKSRLQADGLRGAPRYRGILDCVHQSYRAEGWRVFTRGLASTLLRAFPVNAATFATVTVVLTYARGEEAGPEGEAVPAAPAGPALAQPSSL

SEQ ID NO: 1388 - protein, 290 aa, Homo Sapiens
MAALRVLLSCVRGPLRPPVRCPAWRPFASGANFEYIIAEKRGKNNTVGLIQLNRPKALNALCDGLIDELNQALKTFEEDPAVGAIVLTGGDKAFAAGADIKEMQNLSFQDCYSSKFLKHWDHLTQVKKPVIAAVNGYAFGGGCELAMMCDIIYAGEKAQFAQPEILIGTIPGAGGTQRLTRAVGKSLAMEMVLTGDRISAQDAKQAGLVSKICPVETLVEEAIQCAEKIASNSKIVVAMAKESVNAAFEMTLTEGSKLEKKLFYSTFATDDRKEGMTAFVEKRKANFKDQ

SEQ ID NO: 1389 - protein, 973 aa, Homo Sapiens [sequence omitted]

SEQ ID NO: 1390 - protein, 101 aa, Homo Sapiens
MSDQEAKPSTEDLGDKKEGEYIKLKVIGQDSSEIHFKVKMTTHLKKLKESYCQRQGVPMNSLRFLFEGQRIADNHTPKELGMEEEDVIEVYQEQTGGHSTV

SEQ ID NO: 1391 - protein, 325 aa, Homo Sapiens
MKPILLQGHERSITQIKYNREGDLLFTVAKDPIVNVWYSVNGERLGTYMGHTGAVWCVDADWDTKHVLTGSADNSCRLWDCETGKQLALLKTNSAVRTCGFDFGGNIIMFSTDKQMGYQCFVSFFDLRDPSQIDNNEPYMKIPCNDSKITSAVWGPLGECIIAGHESGELNQYSAKSGEVLVNVKEHSRQINDIQLSRDMTMFVTASKDNTAKLFDSTTLEHQKTFRTERPVNSAALSPNYDHVVLGGGQEAMDVTTTSTRIGKFEARFFHLAFEEEFGRVKGHFGPINSVAFHPDGKSYSSGGEDGYVRIHYFDPQYFEFEFEA

SEQ ID NO: 1392 - protein, 1980 aa, Homo Sapiens
MNPTNPFSGQQPSAFSASSSNVGTLPSKPPFRFGQPSLFGQNSTLSGKSSGFSQVSSFPASSGVSHSSSVQTLGFTQTSSVGPFSGLEHTSTFVATSGPSSSSVLGNTGFSFKSPTSVGAFPSTSAFGQEAGEIVNSGFGKTEFSFKPLENAVFKPILGAESEPEKTQSQIASGFFTFSHPISSAPGGLAPFSFPQVTSSSATTSNFTFSKPVSSNNSLSAFTPALSNQNVEEEKRGPKSIFGSSNNSFSSFPVSSAVLGEPFQASKAGVRQGCEEAVSQVEPLPSLMKGLKRKEDQDRSPRRHGHEPAEDSDPLSRGDHPPDKRPVRLNRPRGGTLFGRTIQDVFKSNKEVGRLGNKEAKKETGFVESAESDHMAIPGGNQSVLAPSRIPGVNKEEETESREKKEDSLRGTPARQSNRSESTDSLGGLSPSEVTAIQCKNIPDYLNDRTILENHFGKIAKVQRIFTRRSKKLAVVHFFDHASAALARKKGKSLHKDMAIFWHRKKISPNKKPFSLKEKKPGDGEVSPSTEDAPFQHSPLGKAAGRTGASSLLNKSSPVKKPSLLKAHQFEGDSFDSASEGSEGLGPCVLSLSTLIGTVAETSKEKYRLLDQRDRIMRQARVKRTDLDKARTFVGTCLDMCPEKERYMRETRSQLSVFEVVPGTDQVDHAAAVKEYSRSSADQEEPLPHELRPLPVLSRTMDYLVTQIMDQKEGSLRDWYDFVWNRTRGIRKDITQQHLCDPLTVSLIEKCTRFHIHCAHFMCEEPMSSFDAKINNENMTKCLQSLKEMYQDLRNKGVFCASEAEFQGYNVLLSLNKGDILREVQQFHPAVRNSSEVKFAVQAFAALNSNNFVRFFKLVQSASYLNACLLHCYFSQIRKDALRALNFAYTVSTQRSTIFPLDGVVRMLLFRDCEEATDFLTCHGLTVSDGCVELNRSAFLEPEGLSKTRKSVFITRKLTVSVGEIVNGGPLPPVPRHTPVCSFNSQNKYIGESLAAELPVSTQRPGSDTVGGGRGEECGVEPDAPLSSLPQSLPAPAPSPVPLPPVLALTPSVAPSLFQLSVQPEPPPPEPVPMYSDEDLAQVVDELIQEALQRDCEEVGSAGAAYAAAALGVSNAAMEDLLTAATTGILRHIAAEEVSKERERREQERQRAEEERLKQERELVLSELSQGLAVELMERVMMEFVRETCSQELKNAVETDQRVRVARCCEDVCAHLVDLFLVEEIFQTAKETLQELQCFCKYLQRWREAVTARKKLRRQMRAFPAAPCCVDVSDRLRALAPSAECPIAEENLARGLLDLGHAGRLGISCTRLRRLRNKTAHQMKVQHFYQQLLSDVAWASLDLPSLVAEHLPGRQEHVFWKLVLVLPDVEEQSPESCGRILANWLKVKFMGDEGSVDDTSSDAGGIQTLSLFNSLSSKGDQMISVNVCIKVAHGALSDGAIDAVETQKDLLGASGLMLLLPPKMKSEDMAEEDVYWLSALLQLKQLLQAKPFQPALPLVVLVPSPGGDAVEKEVEDGLMLQDLVSAKLISDYTVTEIPDTINDLQGSTKVLQAVQWLVSHCPHSLDLCCQTLIQYVEDGIGHEFSGRFFHDRRERRLGGLASQEPGAIIELFNSVLQFLASVVSSEQLCDLSWPVTEFAEAGGSRLLPHLHWNAPEHLAWLKQAVLGFQLPQMDLPPLGAPWLPVCSMVVQYASQIPSSRQTQPVLQSQVENLLHRTYCRWKSKSPSPVHGAGPSVMEIPWDDLIALCINHKLRDWTPPRLPVTSEALSEDGQICVYFFKNDLKKYDVPLSWEQARLQTQKELQLREGRLAIKPFHPSANNFPIPLLHMHRNWKRSTECAQEGRIPSTEDLMRGASAEELLAQCLSSSLLLEKEENKRFEDQLQQWLSEDSGAFTDLTSLPLYLPQTLVSLSHTIEPVMKTSVTTSPQSDMMREQLQLSEATGTCLGERLKHLERLIRSSREEEVASELHLSALLDMVDI

SEQ ID NO: 1393 - protein, 399 aa, Homo Sapiens
MEDGVYEPPDLTPEERMELENIRRRKQELLVEIQRLREELSEAMSEVEGLEANEGSKTLQRNRKMAMGRKKFNMDPKKGIQFLVENELLQNTPEEIARFLYKGEGLNKTAIGDYLGEREELNLAVLHAFVDLHEFTDLNLVQALRQFLWSFRLPGEAQKIDRMMEAFAQRYCLCNPGVFQSTDTCYVLSFAVIMLNTSLHNPNVRDKPGLERFVAMNRGINEGGDLPEELLRNLYDSIRNEPFKIPEDDGNDLTHTFFNPDREGWLLKLGGRVKTWKRRWFILTDNCLYYFEYTTDKEPRGIIPLENLSIREVDDPRKPNCFELYIPNNKGQLIKACKTEADGRVVEGNHMVYRISAPTQEEKDEWIKSIQAAVSVDPFYEMLAARKKRISVKKKQEQP

SEQ ID NO: 1394 - protein, 193 aa, Homo Sapiens
MFKNTFQSGFLSILYSIGSKPLQIWDKKVRNGHIKRITDNDIQSLVLEIEGTNVSTTYITCPADPKKTLGIKLPFLVMIIKNLKKYFTFEVQVLDDKNVRRRFRASNYQSTTRVKPFICTMPMRLDDGWNQIQFNLLDFTRRAYGTNYIETLRVQIHANCRIRRVYFSDRLYSEDELPAEFKLYLPVQNKAKQ

SEQ ID NO: 1395 - protein, 437 aa, Homo Sapiens
MEKELRSTILFNAYKKEIFTTNNGYKSMQKKLRSNWKIQSLKDEITSEKLNGVKLWITAGPREKFTAAEFEILKKYLDTGGDVFVMLGEGGESRFDTNINFLLEEYGIMVNNDAVVRNVYHKYFHPKEALVSSGVLNREISRAAGKAVPGIIDEESSGNNAQALTFVYPFGATLSVMKPAVAVLSTGSVCFPLNRPILAFYHSKNQGGKLAVLGSCHMFSDQYLDKEENSKIMDVVFQWLTTGDIHLNQIDAEDPEISDYMMLPYTATLSKRNRECLQESDEIPRDFTTLFDLSIFQLDTTSFHSVIEAHEQLNVKHEPLQLIQPQFETPLPTLQPAVFPPSFRELPPPPLELFDLDETFSSEKARLAQITNKCTEEDLEFYVRKCGDILGVTSKLPKDQQDAKHILEHVFFQVVEFKKLNQEHDIDTSETAFQNNF

SEQ ID NO: 1396 - protein, 438 aa, Homo Sapiens
MGEAPSPAPALWDWDYLDRCFARHRVCISFGLWICASSCWIAAHALLLYLRCAQKPRQDQSALCAACCLLTSLCDTVGALLARQLTIQVFTGAYLAAIDLVNFMFILFPVCGSKFKSNSDREARERKRRRQLRASVFALALPLSLGPCWALWVAVPKASATIRGPQRRLLASLLQENTEILGYLLGSVAAFGSWASRIPPLSRICRGKTFPSIHLWTRLLSALAGLLYASAIVAHDQHPEYLLRATPWFLTSLGRAALDLAIIFLSCVMKSKMRQALGFAKEARESPDTQALLTCAEKEEENQENLDWVPLTTLSHCKSLRTMTAISRYMELTIEPVQQAGCSATRLPGDGQTSAGDASLQDPPSYPPVQVIRARVSSGSSSEVSSINSDLEKYWEALNSEQWDPEDVNLEGSKENVELLGSQVHQDSVRTAHLSDDD

SEQ ID NO: 1397 - protein, 213 aa, Homo Sapiens
MAAPAVSGLSRQVRCFSTSVVRPFAKLVRPPVQVYGIEGRYATALYSAASKQNKLEQVEKELLRVAQILKEPKVAASVLNPYVKRSIKVKSLNDITAKERFSPLTTNLINLLAENGRLSNTQGVVSAFSTMMSVHRGEVPCTVTSASPLEEATLSELKTVLKSFLSQGQVLKLEAKTDPSILGGMIVRIGEKYVDMSVKTKIQKLGRAMREIV

SEQ ID NO: 1398 - protein, 491 aa, Homo Sapiens
MALLWGLLVLSWSCLQGPCSVFSPVSAMEPLGRQLTSGPNQEQVSPLTLLKLGNQEPGGQTALKSPPGVCSRDPTPEQTHRLARAMMAFTADLFSLVAQTSTCPNLILSPLSVALALSHLALGAQNHTLQRLQQVLHAGSGPCLPHLLSRLCQDLGPGAFRLAARMYLQKGFPIKEDFLEQSEQLFGAKPVSLTGKQEDDLANINQWVKEATEGKIQEFLSGLPEDTVLLLLNAIHFQGFWRNKFDPSLTQRDSFHLDEQFTVPVEMMQARTYPLRWFLLEQPEIQVAHFPFKNNMSFVVLVPTHFEWNVSQVLANLSWDTLHPPLVWERPTKVRLPKLYLKHQMDLVATLSQLGLQELFQAPDLRGISEQSLVVSGVQHQSTLELSEVGVEAAAATSIAMSRMSLSSFSVNRPFLFFIFEDTTGLPLFVGSVRNPNPSAPRELKEQQDSPGNKDFLQSLKGFPRGDKLFGPDLKLVPPMEEDYPQFGSPK

SEQ ID NO: 1399 - protein, 331 aa, Homo Sapiens
METVISSDSSPAVENEHPQETPESNNSVYTSFMKSHRCYDLIPTSSKLVVFDTSLQVKKAFFALVTNGVRAAPLWDSKKQSFVGMLTITDFINILHRYYKSALVQIYELEEHKIETWREVYLQDSFKPLVCISPNASLFDAVSSLIRNKIHRLPVIDPESGNTLYILTHKRILKFLKLFITEFPKPEFMSKSLEELQIGTYANIAMVRTTTPVYVALGIFVQHRVSALPVVDEKGRVVDIYSKFDVINLAAEKTYNNLDVSVTKALQHRSHYFEGVLKCYLHETLETIINRLVEAEVHRLVVVDENDVVKGIVSLSDILQALVLTGGEKKP

SEQ ID NO: 1400 - protein, 942 aa, Homo Sapiens
MASDAVQSEPRSWSLLEQLGLAGADLAAPGVQQQLELERERLRREIRKELKLKEGAENLRRATTDLGRSLGPVELLLRGSSRRLDLLHQQLQELHAHVVLPDPAATHDGPQSPGAGGPTCSATNLSRVAGLEKQLAIELKVKQGAENMIQTYSNGSTKDRKLLLTAQQMLQDSKTKIDIIRMQLRRALQAGQLENQAAPDDTQGSPDLGAVELRIEELRHHFRVEHAVAEGAKNVLRLLSAAKAPDRKAVSEAQEKLTESNQKLGLLREALERRLGELPADHPKGRLLREELAAASSAAFSTRLAGPFPATHYSTLCKPAPLTGTLEVRVVGCRDLPETIPWNPTPSMGGPGTPDSRPPFLSRPARGLYSRSGSLSGRSSLKAEAENTSEVSTVLKLDNTVVGQTSWKPCGPNAWDQSFTLELERARELELAVFWRDQRGLCALKFLKLEDFLDNERHEVQLDMEPQGCLVAEVTFRNPVIERIPRLRRQKKIFSKQQGKAFQRARQMNIDVATWVRLLRRLIPNATGTGTFSPGASPGSEARTTGDISVEKLNLGTDSDSSPQKSSRDPPSSPSSLSSPIQESTAPELPSETQETPGPALCSPLRKSPLTLEDFKFLAVLGRGHFGKVLLSEFRPSGELFAIKALKKGDIVARDEVESLMCEKRILAAVTSAGHPFLVNLFGCFQTPEHVCFVMEYSAGGDLMLHIHSDVFSEPRAIFYSACVVLGLQFLHEHKIVYRDLKLDNLLLDTEGYVKIADFGLCKEGMGYGDRTSTFCGTPEFLAPEVLTDTSYTRAVDWWGLGVLLYEMLVGESPFPGDDEEEVFDSIVNDEVRYPRFLSAEAIGIMRRLLRRNPERRLGSSERDAEDVKKQPFFRTLGWEALLARRLPPPFVPTLSGRTDVSNFDEEFTGEAPTLSPPRDARPLTAAEQAAFLDFDFVAGGC

SEQ ID NO: 1401 - protein, 698 aa, Homo Sapiens
MRLAVGALLVCAVLGLCLAVPDKTVRWCAVSEHEATKCQSFRDHMKSVIPSDGPSVACVKKASYLDCIRAIAANEADAVTLDAGLVYDAYLAPNNLKPVVAEFYGSKEDPQTFYYAVAVVKKDSGFQMNQLRGKKSCHTGLGRSAGWNIPIGLLYCDLPEPRKPLEKAVANFFSGSCAPCADGTDFPQLCQLCPGCGCSTLNQYFGYSGAFKCLKDGAGDVAFVKHSTIFENLANKADRDQYELLCLDNTRKPVDEYKDCHLAQVPSHTVVARSMGGKEDLIWELLNQAQEHFGKDKSKEFQLFSSPHGKDLLFKDSAHGFLKVPPRMDAKMYLGYEYVTAIRNLREGTCPEAPTDECKPVKWCALSHHERLKCDEWSVNSVGKIECVSAETTEDCIAKIMNGEADAMSLDGGFVYIAGKCGLVPVLAENYNKSDNCEDTPEAGYFAVAVVKKSASDLTWDNLKGKKSCHTAVGRTAGWNIPMGLLYNKINHCRFDEFFSEGCAPGSKKDSSLCKLCMGSGLNLCEPNNKEGYYGYTGAFRCLVEKGDVAFVKHQTVPQNTGGKNPDPWAKNLNEKDYELLCLDGTRKPVEEYANCHLARAPNHAVVTRKDKEACVHKILRQQQHLFGSNVTDCSGNFCLFRSETKDLLFRDDTVCLAKLHDRNTYEKYLGEEYVKAVGNLRKCSTSSLLEACTFRRP

SEQ ID NO: 1402 - protein, 623 aa, Homo Sapiens
MESYHKPDQQKLQALKDTANRLRISSIQATTAAGSGHPTSCCSAAEIMAVLFFHTMRYKSQDPRNPHNDRFVLSKGHAAPILYAVWAEAGFLAEAELLNLRKISSDLDGHPVPKQAFTDVATGSLGQGLGAACGMAYTGKYFDKASYRVYCLLGDGELSEGSVWEAMAFASIYKLDNLVAILDINRLGQSDPAPLQHQMDIYQKRCEAFGWHAIIVDGHSVEELCKAFGQAKHQPTAIIAKTFKGRGITGVEDKESWHGKPLPKNMAEQIIQEIYSQIQSKKKILATPPQEDAPSVDIANIRMPSLPSYKVGDKIATRKAYGQALAKLGHASDRIIALDGDTKNSTFSEIFKKEHPDRFIECYIAEQNMVSIAVGCATRNRTVPFCSTFAAFFTRAFDQIRMAAISESNINLCGSHCGVSIGEDGPSQMALEDLAMFRSVPTSTVFYPSDGVATEKAVELAANTKGICFIRTSRPENAIIYNNNEDFQVGQAKVVLKSKDDQVTVIGAGVTLHEALAAAELLKKEKINIRVLDPFTIKPLDRKLILDSARATKGRILTVEDHYYEGGIGEAVSSAVVGEPGITVTHLAVNRVPRSGKPAELLKMFGIDRDAIAQAVRGLITKA

SEQ ID NO: 1403 - protein, 339 aa, Homo Sapiens
MAQYKGAASEAGRAMHLMKKREKQREQMEQMKQRIAEENIMKSNIDKKFSAHYDAVEAELKSSTVGLVTLNDMKAKQEALVKEREKQLAKKEQSKELQMKLEKLREKERKKEAKRKISSLSFTLEEEEEGGEEEEEAAMYEEEMEREEITTKKRKLGKNPDVDTSFLPDRDREEEENRLREELRQEWEAKQEKIKSEEIEITFSYWDGSGHRRTVKMRKGNTMQQFLQKALEILRKDFSELRSAGVEQLMYIKEDLIIPHHHSFYDFIVTKARGKSGPLFNFDVHDDVRLLSDATVEKDESHAGKVVLRSWYEKNKHIFPASRWEPYDPEKKWDKYTIR

SEQ ID NO: 1404 - protein, 1711 aa, Homo Sapiens
MSAKVRLKKLEQLLLDGPWRNESALSVETLLDVLVCLYTECSHSALRRDKYVAEFLEWAKPFTQLVKEMQLHREDFEIIKVIGRGAFGEVAVVKMKNTERIYAMKILNKWEMLKRAETACFREERDVLVNGDCQWITALHYAFQDENHLYLVMDYYVGGDLLTLLSKFEDKLPEDMARFYIGEMVLAIDSIHQLHYVHRDIKPDNVLLDVNGHIRLADFGSCLKMNDDGTVQSSVAVGTPDYISPEILQAMEDGMGKYGPECDWWSLGVCMYEMLYGETPFYAESLVETYGKIMNHEERFQFPSHVTDVSEEAKDLIQRLICSRERRLGQNGIEDFKKHAFFEGLNWENIRNLEAPYIPDVSSPSDTSNFDVDDDVLRNTEILPPGSHTGFSGLHLPFIGFTFTTESCFSDRGSLKSIMQSNTLTKDEDVQRDLEHSLQMEAYERRIRRLEQEKLELSRKLQESTQTVQSLHGSSRALSNSNRDKEIKKLNEEIERLKNKIADSNRLERQLEDTVALRQEREDSTQRLRGLEKQHRVVRQEKEELHKQLVEASERLKSQAKELKDAHQQRKLALQEFSELNERMAELRAQKQKVSRQLRDKEEEMEVATQKVDAMRQEMRRAEKLRKELEAQLDDAVAEASKERKLREHSENFCKQMESELEALKVKQGGRGAGATLEHQQEISKIKSELEKKVLFYEEELVRREASHVLEVKNVKKEVHDSESHQLALQKEILMLKDKLEKSKRERHNEMEEAVGTIKDKYERERAMLFDENKKLTAENEKLCSFVDKLTAQNRQLEDELQDLAAKKESVAHWEAQIAEIIQWVSDEKDARGYLQALASKMTEELEALRSSSLGSRTLDPLWKVRRSQKLDMSARLELQSALEAEIRAKQLVQEELRKVKDANLTLESKLKDSEAKNRELLEEMEILKKKMEEKFRADTGLKLPDFQDSIFEYFNTAPLAHDLTFRTSSASEQETQAPKPEASPSMSVAASEQQEDMARPPQRPSAVPLPTTQALALAGPKPKAHQFSIKSFSSPTQCSHCTSLMVGLIRQGYACEVCSFACHVSCKDGAPQVCPIPPEQSKRPLGVDVQRGIGTAYKGHVKVPKPTGVKKGWQRAYAVVCDCKLFLYDLPEGKSTQPGVIASQVLDLRDDEFSVSSVLASDVIHATRRDIPCIFRVTASLLGAPSKTSSLLILTENENEKRKWVGILEGLQSILHKNRLRNQVVHVPLEAYDSSLPLIKAILTAAIVDADRIAVGLEEGLYVIEVTRDVIVRAADCKKVHQIELAPREKIVILLCGRNHHVHLYPWSSLDGAEGSFDIKLPETKGCQLMATATLKRNSGTCLFVAVKRLILCYEIQRTKPFHRKFNEIVAPGSVQCLAVLRDRLCVGYPSGFCLLSIQGDGQPLNLVNPNDPSLAFLSQQSFDALCAVELESEEYLLCFSHMGLYVDPQGRRARAQELMWPAAPVACSCSPTHVTVYSEYGVDVFDVRTMEWVQTIGLRRIRPLNSEGTLNLLNCEPPRLIYFKSKFSGAVLNVPDTSDNSKKQMLRTRSKRRFVFKVPEEERLQQRREMLRDPELRSKMISNPTNFNHVAHMGPGDGMQVLMDLPLSAVPPSQEERPGPAPTNLARQPPSRNKPYISWPSSGGSEPSVTVPLRSMSDPDQDFDKEPDSDSTKHSTPSNSSNPSGPPSPNSPHRSQLPLEGLEQPACDT

SEQ ID NO: 1405 - protein, 168 aa, Homo Sapiens
MTATLRPYLSAVRATLQAALCLENFSSQVVERHNKPEVEVRSSKELLLQPVTISRNEKEKVLIEGSINSVRVSIAVKQADEIEKILCHKFMRFMMMRAENFFILRRKPVEGYDISFLITNFHTEQMYKHKLVDFVIHFMEEIDKEISEMKLSVNARARIVAEEFLKNF

SEQ ID NO: 1406 - protein, 316 aa, Homo Sapiens
MPQTVILPGPAPWGFRLSGGIDFNQPLVITRITPGSKAAAANLCPGDVILAIDGFGTESMTHADAQDRIKAAAHQLCLKIDRGETHLWSPQVSEDGKAHPFKINLESEPQEFKPIGTAHNRRAQPFVAAANIDDKRQVVSASYNSPIGLYSTSNIQDALHGQLRGLIPSSPQNEPTASVPPESDVYRMLHDNRNEPTQPRQSGSFRVLQGMVDDGSDDRPAGTRSVRAPVTKVHGGSGGAQRMPLCDKCGSGIVGAVVKARDKYRHPECFVCADCNLNLKQKGYFFIEGELYCETHARARTKPPEGYDTVTLYPKA

SEQ ID NO: 1407 - protein, 151 aa, Homo Sapiens
MPRGSRSRTSRMAPPASRAPQMRAAPRPAPVAQPPAAAPPSAVGSSAAAPRQPGLMAQMATTAAGVAVGSAVGHTLGHAITGGFSGGSNAEPARPDITYQEPQGTQPAQQQQPCLYEIKQFLECAQNQGDIKLCEGFNEVLKQCRLANGLA

SEQ ID NO: 1408 - protein, 677 aa, Homo Sapiens
MGSRCRAWAWTRAWALAEFQARAEEGAAAAAAAAGGYPSTGRCRCSLRGMEGTAVAVFEILRFLIIHWKCDIDVSKGALLEGQLVISIEGLNSKHQANALHCVTTRWSLTLLPRPECSGAVSAHCNLHLPGSSDSHASVPRVAGITDAHHHAWLIMVASAGSLFGGMVLKKFLKEIQSILPGISAKLTWTSEEGSYSQDMTGVTPFQMIFEVDEKPRTLMTDCLVIKHFLRKIIMVHPKVRFHFSVKVNGILSTEIFGVENEPTLNLGNGIALLVDSQHYVRPNFGTIESHCSRIHPVLGHPVMLFIPEDVAGMDLLGELILTPAAALCPSPKVSSNQLNRISSVSIFLYGPLGLPLILSTWEQPMTTFFKDTSSLVDWKKYHLCMIPNLDLNLDRDLVLPDVSYQVESSEEDQSQTMDPQGQTLLLFLFVDFHSAFPVQQMEIWGVYTLLTTHLNAILVESHSVVQGSIQFTVDKVLEQHHQAAKAQQKLQASLSVAVNSIMSILTGSTRSSFRKMCLQTLQAADTQEFRTKLHKVFREITQHQFLHHCSCEVKQQLTLEKKDSAQGTEDAPDNSSLELLADTSGQAENKRLKRGSPRIEEMRALRSARAPSPSEAAPRRPEATAAPLTPRGREHREAHGRALAPGRASLGSRLEDVLWLQEVSNLSEWLSPSPGP

SEQ ID NO: 1409 - protein, 403 aa, Homo Sapiens
MAGAATQASLESAPRIMRLVAECSRSRARAGELWLPHGTVATPVFMPVGTQATMKGITTEQLDALGCRICLGNTYHLGLRPGPELIQKANGLHGFMNWPHNLLTDSGGFQMVSLVSLSEVTEEGVRFRSPYDGNETLLSPEKSVQIQNALGSDIIMQLDDVVSSTVTGPRVEEAMYRSIRWLDRCIAAHQRPDKQNLFAIIQGGLDADLRATCLEEMTKRDVPGFAIGGLSGGESKSQFWRMVALSTSRLPKDKPRYLMGVGYATDLVVCVALGCDMFDCVFPTRTARFGSALVPTGNLQLRKKVFEKDFGPIDPECTCPTCQKHSRAFLHALLHSDNTAALHHLTVHNIAYQLQLMSAVRTSIVEKRFPDFVRDFMGAMYGDPTLCPTWATDALASVGITLG

SEQ ID NO: 1410 - protein, 894 aa, Homo Sapiens
MNSMNPMKPALPPAPHGDGSFAYESVPWQQSATQPAGSLSVVTTVWGVGNATQSQVLGNPMGPAGSPSGSSMMPGVAGGSSALTSPQCLGQQAFAEGGANKGYVQQGVYSRGGYPGAPGFTTGYAGGPGGLGLPSHAARPSTDFTQAAAAAAVAAAAATATATATATVAALQEKQSQELSQYGAMGAGQSFNSQFLQHGGPRGPSVPAGMNPTGIGGVMGPSGLSPLAMNPTRAAGMTPLYAGQRLPQHGYPGPPQAQPLPRQGVKRTYSEVYPGQQYLQGGQYAPSTAQFAPSPGQPPAPSPSYPGHRLPLQQGMTQSLSVPGPTGLHYKPTRSIPGYPSSPLPGNPTPPMTPSSSVPYMSPNQEVKSPFLPDLKPNLNSLHSSPSGSGPCDELRLTFPVRDGVVLEPFRLQHNLAVSNHVFQLRDSVYKTLIMRPDLELQFKCYHHEDRQMNTNWPASVQVSVNATPLTIERGDNKTSHKPLYLKHVCQPGRNTIQITVTACCCSHLFVLQLVHRPSVRSVLQGLLKKRLLPAEHCITKIKRNFSSGTIPGTPGPNGEDGVEQTAIKVSLKCPITFRRIQLPARGHDCRHIQCFDLESYLQLNCERGTWRCPVCNKTALLEGLEVDQYMLGILIYIQNSDYEEITIDPTCSWKPVPVKPDMHIKEEPDGPALKRCRTVSPAHVLMPSVMEMIAALGPGAAPFAPLQPPSVPAPSDYPGQGSSFLGPGTFPESFPPTTPSTPTLAEFTPGPPPISYQSDIPSSLLTSEKSTACLPSQMAPAGHLDPTHNPGTPGLHTSNLGAPPGPQLHHSNPPPASRQSLGQASLGPTGELAFSPATGVMGPPSMSGAGEAPEPALDLLPELTNPDELLSYLGPPDLPTNNNDDLLSLFENN

SEQ ID NO: 1411 - protein, 320 aa, Homo Sapiens
MSKSASPKEPEQLRKLFIGGLSFETTDESLRSHFEQWGTLTDCVVMRDPNTKRSRGFGFVTYATVEEVDAAMNTTPHKVDGRVVEPKRAVSREDSQRPGAHLTVKKIFVGGIKEDTEEHHLRDYFEQYGKIEVIEIMTDRGSGKKRGFAFVTFDDHDSVDKIVIQKYHTVKGHNCEVRKALPKQEMASASSSQRGRRGSGNFGGGRGDGFGGNDNFGRGGNFSGRGGFGGSCGGGGYGGSGDGYNGFGNDGSNFGGGGSYNDFGNYNNQSSNFGPMKGGNFGGRSSGPYGGGGQYFAKPQNQGGYGVSSSSSSYGSGRRF

SEQ ID NO: 1412 - protein, 663 aa, Homo Sapiens
MGNILTCRVHPSVSLEFDQQQGSVCPSESEIYEAGAEDRMAGAPMAAAVQPAEVTVEVGEDLHMHHVRDREMPEALEFNPSANPEASTIFQRNSQTDVVEIRRSNCTNHVSTVHFSQQYSLCSTIFLDDSTAIQHYLTMTIISVTLEIPHHITQRDADRSLSIPDEQLHSFAVSTVHITKNRNGGGSLNNYSSSIPSTPSTSQEDPQFSVPPTANTPTPVCKRSMRWSNLFTSEKGSDPDKERKAPENHADTIGSGRAIPIKQGMLLKRSGKWLKTWKKKYVTLCSNGVLTYYSSLGDYMKYIHKKEIDLQTSTIKVPGKWPSLATLACTPISSSKSDGLSKDMDTGLGDSICFSPSISSTTIPKLNPPPSPHANKKKHLKKKSTNNFMIVSATGQTWHFEATTYEERDAWVQAIQSQILASLQSCESSKSKSQLTSQSEAMALQSIQNMRGNAHCVDCETQNPKWASLNLGVLMCIECSGIHRSLGTRLSRVRSLELDDWPVELRKVMSSIGNDLANSIWEGSSQGRTKPTEKSTREEKERWIRSKYEEKLFLAPLPCTELSLGQQLLRATADEDLQTAILLLAHGSREEVNETCGEGDGCTALHLACRKGNVVLAQLLIWYGVDVMARDAHGNTALTYARQASSQECINVLLQYGCPDECV

SEQ ID NO: 1413 - protein, 522 aa, Homo Sapiens
MALLPRALSAGAGPSWRRAARAFRGFLLLLPEPAALTRALSRAMACRQEPQPQGPPPAAGAVASYDYLVIGGGSGGLASARRAAELGARAAVVESHKLGGTCVNVGCVPKKVMWNTAVHSEFMHDHADYGFPSCEGKFNWRVIKEKRDAYVSRLNAIYQNNLTKSHIEIIRGHAAFTSDPKPTIEVSGKKYTAPHILIATGGMPSTPHESQIPGASLGITSDGFFQLEELPGRSVIVGAGYIAVEMAGILSALGSKTSLMIRHDKVLRSFDSMISTNCTEELENAGVEVLKFSQVKEVKKTLSGLEVSMVTAVPGRLPVMTMIPDVDCLLWAIGRVPNTKDLSLNKLGIQTDDKGHIIVDEFQNTNVKGIYAVGDVCGKALLTPVAIAAGRKLAHRLFEYKEDSKLDYNNIPTVVFSHPPIGTVGLTEDEAIHKYGIENVKTYSTSFTPMYHAVTKRKTKCVMKMVCANKEEKVVGIHMQGLGCDEMLQGFAVAVKMGATKADFDNTVAIHPTSSEELVTLR

SEQ ID NO: 1414 - protein, 525 aa, Homo Sapiens
MLLPLLLLLPMCWAVEVKRPRGVSLTNHHFYDESKPFTCLDGSATIPFDQVNDDYCDCKDGSDEPGTAACPNGSFHCTNTGYKPLYIPSNRVNDGVCDCCDGTDEYNSGVICENTCKEKGRKERESLQQMAEVTREGFRLKKILIEDWKKAREEKQKKLIELQAGKKSLEDQVEMLRTVKEEAEKPEREAKEQHQKLWEEQLAAAKAQQEQELAADAFKELDDDMDGTVSVTELQTHPELDTDGDGALSEAEAQALLSGDTQTDATSFYDRVWAAIRDKYRSEALPTDLPAPSAPDLTEPKEEQPPVPSSPTEEEEEEEEEEEEEAEEEEEEEDSEVQGEQPKPASPAEEDKMPPYDEQTQAFIDAAQEARNKFEEAERSLKDMEESIRNLEQEISFDFGPNGEFAYLYSQCYELTTNEYVYRLCPFKLVSQKPKLGGSPTSLGTWGSWIGPDHDKFSAMKYEQGTGCWQGPNRSTTVRLLCGKETMVTSTTEPSRCEYLMELMTPAACPEPPPEAPTEDDHDEL

SEQ ID NO: 1415 - protein, 87 aa, Homo Sapiens
  misc_feature (13)..(13): Xaa can be any naturally occurring amino acid
MALAVRVVYCGAXGYKSKYLQLKKKLEDEFPGRLDICGEGTPQATGFFEVMVAGKLIHSKKKGDGYVDTESKFLKLVAAIKAALAQG

SEQ ID NO: 1416 - protein, 294 aa, Homo Sapiens
GKDIETPGLPRPLSLRSLARLHGGGPEPPPPSKDGDAVQTPQLYTTFLPPPEGVPPPELACLPTPESTPELPVKHLRAAGDPWEWNQNRNNAKEGPGRSRGGHAAGGPAPRVLVRPPPPGCPGQAVEVTTLEELLRYLHGPQPPRKGAEPPAPLTSRALPPEPAPALLGGPSPRPHECASPLRLDVPPEGRCASAPARPALSAPAPRLGVGGGRRLPFSGHRAPPALLTRVPSGGPSRYSGGPGKHLLYLGRPEGYRGRALKRVDVEKPQLSLKPPLVGPSSRQAVPNGGRFNF

SEQ ID NO: 1417 - protein, 125 aa, Homo Sapiens
MPRYELALILKAMQRPETAATLKRTIEALMDRGAIVRDLENLGERALPYRISAHSQQHNRGGYFLVDFYAPTAAVESMVEHLSRDIDVIRGNIVKHPLTQELKECEGIVPVPLAEKLYSTKKRKK

SEQ ID NO: 1418 - protein, 155 aa, Homo Sapiens
MSESKSGPEYASFFAVMGASAAMVFSALGAAYGTAKSGTGIAAMSVMRPEQIMKSIIPVVMAGIIAIYGLVVAVLIANSLNDDISLYKSFLQLGAGLSVGLSGLAAGFAIGIVGDAGVRGTAQQPRLFVGMILILIFAEVLGLYGLIVALILSTK

SEQ ID NO: 1419 - protein, 1278 aa, Homo Sapiens
MAQSKRHVYSRTPSGSRMSAEASARPLRVGSRVEVIGKGHRGTVAYVGATLFATGKWVGVILDEAKGKNDGTVQGRKYFTCDEGHGIFVRQSQIQVFEDGADTTSPETPDSSASKVLKREGTDTTAKTSKLRGLKPKKAPTARKTTTRRPKPTRPASTGVAGASSSLGPSGSASAGELSSSEPSTPAQTPLAAPIIPTPVLTSPGAVPPLPSPSKEEEGLRAQVRDLEEKLETLRLKRAEDKAKLKELEKHKIQLEQVQEWKSKMQEQQADLQRRLKEARKEAKEALEAKERYMEEMADTADAIEMATLDKEMAEERAESLQQEVEALKERVDELTTDLEILKAEIEEKGSDGAASSYQLKQLEEQNARLKDALVRMRDLSSSEKQEHVKLQKLMEKKNQELEVVRQQRERLQEELSQAESTIDELKEQVDAALGAEEMVEMLTDRNLNLEEKVRELRETVGDLEAMNEMNDELQENARETELELREQLDMAGARVREAQKRVEAAQETVADYQQTIKKYRQLTAHLQDVNRELTNQQEASVERQQQPPPETFDFKIKFAETKAHAKAIEMELRQMEVAQANRHMSLLTAFMPDSFLRPGGDHDCVLVLLLMPRLICKAELIRKQAQEKFELSENCSERPGLRGAAGEQLSFAAGLVYSLSLLQATLHRYEHALSQCSVDVYKKVGSLYPEMSAHERSLDFLIELLHKDQLDETVNVEPLTKAIKYYQHLYSIHLAEQPEDCTMQLADHIKFTQSALDCMSVEVGRLRAFLQGGQEATDIALLLRDLETSCSDIRQFCKKIRRRMPGTDAPGIPAALAFGPQVSDTLLDCRKHLTWVVAVLQEVAAAAAQLIAPLAENEGLLVAALEELAFKASEQIYGTPSSSPYECLRQSCNILISTMNKLATAMQEGEYDAERPPSKPPPVELRAAALRAEITDAEGLGLKLEDRETVIKELKKSLKIKGEELSEANVRLSLLEKKLDSAAKDADERIEKVQTRLEETQALLRKKEKEFEETMDALQADIDQLEAEKAELKQRLNSQSKRTIEGLRGPPPSGIATLVSGIAGEEQQRGAIPGQAPGSVPGPGLVKDSPLLLQQISAMRLHISQLQHENSILKGAQMKASLASLPPLHVAKLSHEGPGSELPAGALYRKTSQLLETLNQLSTHTHVVDITRTSPAAKSPSAQLMEQVAQLKSLSDTVEKLKDEVLKETVSQRPGATVPTDFATFPSSAFLRAKEEQQDDTVYMGKVTFSCAAGFGQRHRLVLTQEQLHQLHSRLIS

SEQ ID NO: 1420 - protein, 1190 aa, Homo Sapiens
MKTRQNKDSMSMRSGRKKEAPGPREELRSRGRASPGGVSTSSSDGKAEKSRQTAKKARVEEASTPKVNKQGRSEEISESESEETNAPKKTKTEQELPRPQSPSDLDSLDGRSLNDDGSSDPRDIDQDNRSTSPSIYSPGSVENDSDSSSGLSQGPARPYHPPPLFPPSPQPPDSTPRQPEASFEPHPSVTPTGYHAPMEPPTSRMFQAPPGAPPPHPQLYPGGTGGVLSGPPMGPKGGGAASSVGGPNGGKQHPPPTTPISVSSSGASGAPPTKPPTTPVGGGNLPSAPPPANFPHVTPNLPPPPALRPLNNASASPPGLGAQPLPGHLPSPHAMGQGMGGLPPGPEKGPTLAPSPHSLPPASSSAPAPPMRFPYSSSSSSSAAASSSSSSSSSSASPFPASQALPSYPHSFPPPTSLSVSNQPPKYTQPSLPSQAVWSQGPPPPPPYGRLLANSNAHPGPFPPSTGAQSTAHPPVSTHHHHHQQQQQQQQQQQQQQQQQQQHHGNSGPPPPGAFPHPLEGGSSHHAHPYAMSPSLGSLRPYPPGPAHLPPPHSQVSYSQAGPNGPPVSSSSNSSSSTSQGSYPCSHPSPSQGPQGAPYPFPPVPTVTTSSATLSTVIATVASSPAGYKTASPPGPPPYGKRAPSPGAYKTATPPGYKPGSPPSFRTGTPPGYRGTSPPAGPGTFKPGSPTVGPGPLPPAGPSGLPSLPPPPAAPASGPPLSATQIKQEPAEEYETPESPVPPARSPSPPPKVVDVPSHASQSARFNKHLDRGFNSCARSDLYFVPLEGSKLAKKRADLVEKVRREAEQRAREEKEREREREREKEREREKERELERSVKLAQEGRAPVECPSLGPVPHRPPFEPGSAVATVPPYLGPDTPALRTLSEYARPHVMSPGNRNHPFYVPLGAVDPGLLGYNVPALYSSDPAAREREREARERDLRDRLKPGFEVKPSELEPLHGVPGPGLDPFPRHGGLALQPGPPGLHPFPFHPSLGPLERERLALAAGPALRPDMSYAERLAAERQHAERVAALGNDPLARLQMLNVTPHHHQHSHIHSHLHLHQQDAIHAASASVHPLIDPLASGSHLTRIPYPAGTLPNPLLPHPLHENEVLRHQLFAAPYRDLPASLSAPMSAAHQLQAMHAQSAELQRLALEQQQWLHAHHPLHSVPLPAQEDYYSHLKKESDKPL

SEQ ID NO: 1421 - protein, 217 aa, Homo Sapiens [sequence omitted]

SEQ ID NO: 1422 - protein, 637 aa, Homo Sapiens
MDPGSGGGGGGGGGGGSSSGSSSSDSAPDCWDQADMEAPGPGPCGGGGSLAAAAEAQRENLSAAFSRQLNVNAKPFVPNVHAAEFVPSFLRGPAAPPPPAGGAANNHGAGSGAGGRAAPVESSQEEQSLCEGSNSAVSMELSEPIVENGETEMSPEESWEHKEEISEAEPGGGSLGDGRPPEESAHEMMEEEEEIPKPKSVVAPPGAPKKEHVNVVFIGHVDAGKSTIGGQIMYLTGMVDKRTLEKYEREAKEKNRETWYLSWALDTNQEERDKGKTVEVGRAYFETEKKHFTILDAPGHKSFVPNMIGGASQADLAVLVISARKGEFETGFEKGGQTREHAMLAKTAGVKHLIVLINKMDDPTVNWSNERYEECKEKLVPFLKKVGFNPKKDIHFMPCSGLTGANLKEQSDFCPWYIGLPFIPYLDNLPNFNRSVDGPIRLPIVDKYKDMGTVVLGKLESGSICKGQQLVMMPNKHNVEVLGILSDDVETDTVAPGENLKIRLKGIEEEEILPGFILCDPNNLCHSGRTFDAQIVIIEHKSIICPGYNAVLHIHTCIEEVEITALICLVDKKSGEKSKTRPRFVKQDQVCIARLRTAGTICLETFKDFPQMGRFTLRDEGKTIAIGKVLKLVPEKD

SEQ ID NO: 1423 - protein, 573 aa, Homo Sapiens
MLRLPTVFRQMRPVSRVLAPHLTRAYAKDVKFGADARALMLQGVDLLADAVAVTMGPKGRTVIIEQSWGSPKVTKDGVTVAKSIDLKDKYKNIGAKLVQDVANNTNEEAGDGTTTATVLARSIAKEGFEKISKGANPVEIRRGVMLAVDAVIAELKKQSKPVTTPEEIAQVATISANGDKEIGNIISDAMKKVGRKGVITVKDGKTLNDELEIIEGMKFDRGYISPYFINTSKGQKCEFQDAYVLLSEKKISSIQSIVPALEIANAHRKPLVIIAEDVDGEALSTLVLNRLKVGLQVVAVKAPGFGDNRKNQLKDMAIATGGAVFGEEGLTLNLEDVQPHDLGKVGEVIVTKDDAMLLKGKGDKAQIEKRIQEIIEQLDVTTSEYEKEKLNERLAKLSDGVAVLKVGGTSDVEVNEKKDRVTDALNATRAAVEEGIVLGGGCALLRCIPALDSLTPANEDQKIGIEIIKRTLKIPAMTIAKNAGVEGSLIVEKIMQSSSEVGYDAMAGDFVNMVEKGIIDPTKVVRTALLDAAGVASLLTTAEVVVTEIPKEEKDPGMGAMGGMGGGMGGGMF

SEQ ID NO: 1424 - protein, 138 aa, Homo Sapiens
MNSLVSWQLLLFLCATHFGEPLEKVASVGNSRPTGQQLESLGLLAPGEQSLPCTERKPAATARLSRRGTSLSPPPESSGSPQQPGLSAPHSRQIPAPQGAVLVQREKDLPNYNWNSFGLRFGKREAAPGNHGRSAGRG

SEQ ID NO: 1425 - protein, 2468 aa, Homo Sapiens
MATVVVEATEPEPSGSIANPAASTSPSLSHRFLDSKFYLLVVVGEIVTEEHLRRAIGNIELGIRSWDTNLIECNLDQELKLFVSRHSARFSPEVPGQKILHHRSDVLETVVLINPSDEAVSTEVRLMITDAARHKLLVLTGQCFENTGELILQSGSFSFQNFIEIFTDQEIGELLSTTHPANKASLTLFCPEEGDWKNSNLDRHNLQDFINIKLNSASILPEMEGLSEFTEYLSESVEVPSPFDILEPPTSGGFLKLSKPCCYIFPGGRGDSALFAVNGFNMLINGGSERKSCFWKLIRHLDRVDSILLTHIGDDNLPGINSMLQRKIAELEEEQSQGSTTNSDWMKNLISPDLGVVFLNVPENLKNPEPNIKMKRSIEEACFTLQYLNKLSMKPEPLFRSVGNTIDPVILFQKMGVGKLEMYVLNPVKSSKEMQYFMQQWTGTNKDKAEFILPNGQEVDLPISYLTSVSSLIVWHPANPAEKIIRVLFPGNSTQYNILEGLEKLKHLDFLKQPLATQKDLTGQVPTPVVKQTKLKQRADSRESLKPAAKPLPSKSVRKESKEETPEVTKVNHVEKPPKVESKEKVMVKKDKPIKTETKPSVTEKEVPSKEEPSPVKAEVAEKQATDVKPKAAKEKTVKKETKVKPEDKKEEKEKPKKEVAKKEDKTPIKKEEKPKKEEVKKEVKKEIKKEEKKEPKKEVKKETPPKEVKKEVKKEEKKEVKKEEKEPKKEIKKLPKDAKKSSTPLSEAKKPAALKPKVPKKEESVKKDSVAAGKPKEKGKIKVIKKEGKAAEAVAAAVGTGATTAAVMAAAGIAAIGPAKELEAERSLMSSPEDLTKDFEELKAEEVDVTKDIKPQLELIEDEEKLKETEPVEAYVIQKEREVTKGPAESPDEGITTTEGEGECEQTPEELEPVEKQGVDDIEKFEDEGAGFEESSETGDYEEKAETEEAEEPEEDGEEHVCVSASKHSPTEDEESAKAEADAYIREKRESVASGDDRAEEDMDEAIEKGEAEQSEEEADEEDKAEDAREEEYEPEKMEAEDYVMAVVDKAAEAGGAEEQYGFLTTPTKQLGAQSPGREPASSIHDETLPGGSESEATASDEENREDQPEEFTATSGYTQSTIEISSEPTPMDEMSTPRDVMSDETNNEETESPSQEFVNITKYESSLYSQEYSKPADVTPLNGFSEGSKTDATDGKDYNASASTISPPSSMEEDKFSRSALRDAYCSEVKASTTLDIKDSISAVSSEKVSPSKSPSLSPSPPSPLEKTPLGERSVNFSLTPNEIKVSAEAEVAPVSPEVTQEVVEEHCASPEDKTLEVVSPSQSVTGSAGHTPYYQSPTDEKSSHLPTEVIEKPPAVPVSFEFSDAKDENERASVSPMDEPVPDSESPIEKVLSPLRSPPLIGSESAYESFLSADDKASGRGAESPFEEKSGKQGSPDQVSPVSEMTSTSLYQDKQEGKSTDFAPIKEDFGQEKKTDDVEAMSSQPALALDERKLGDVSPTQIDVSQFGSFKEDTKMSISEGTVSDKSATPVDEGVAEDTYSHMEGVASVSTASVATSSFPEPTTDDVSPSLHAEVGSPHSTEVDDSLSVSVVQTPTTFQETEMSPSKEECPRPMSISPPDFSPKTAKSRTPVQDHRSEQSSMSIEFGQESPEQSLAMDFSRQSPDHPTVGAGVLHITENGPTEVDYSPSDMQDSSLSHKIPPMEEPSYTQDNDLSELISVSQVEASPSTSSAHTPSQIASPLQEDTLSDVAPPRDMSLYASLTSEKVQSLEGEKLSPKSDISPLTPRESSPLYSPTFSDSTSAVKEKTATCHSSSSPPIDAASAEPYGFRASVLFDTMQHHLALNRDLSTPGLEKDSGGKTPGDFSYAYQKPEETTRSPDEEDYDYESYEKTTRTSDVGGYYYEKIERTTKSPSDSGYSYETIGKTTKTPEDGDYSYEIIEKTTRTPEEGGYSYDISEKTTSPPEVSGYSYEKTERSRRLLDDISNGYDDSEDGGHTLGDPSYSYETTEKITSFPESEGYSYETSTKTTRTPDTSTYCYETAEKITRTPQASTYSYETSDLCYTAEKKSPSEARQDVDLCLVSSCEYKHPKTELSPSFINPNPLEWFASEEPTEESEKPLTQSGGAPPPPGGKQQGRQCDETPPTSVSESAPSQTDSDVPPETEECPSITADANIDSEDESETIPTDKTVTYKHMDPPPAPVQDRSPSPRHPDVSMVDPEALAIEQNLGKALKKDLKEKTKTKKPGTKTKSSSPVKKSDGKSKPLAASPKPAGLKESSDKVSRVASPKKKESVEKAAKPTTTPEVKAARGEEKDKETKNAANASASKSAKTATAGPGTTKTTKSSAVPPGLPVYLDLCYIPNHSNSKNVDVEFFKRVRSSYYVVSGNDPAAEEPSRAVLDALLEGKAQWGSNMQVTLIPTHDSEVMREWYQETHEKQQDLNIMVLASSSTVVMQDESFPACKIEL

SEQ ID NO: 1426 - protein, 352 aa, Homo Sapiens
MAEPRQEFEVMEDHAGTYGLGDRKDQGGYTMHQDQEGDTDAGLKAEEAGIGDTPSLEDEAAGHVTQARMVSKSKDGTGSDDKKAKGADGKTKIATPRGAAPPGQKGQANATRIPAKTPPAPKTPPSSGEPPKSGDRSGYSSPGSPGTPGSRSRTPSLPTPPTREPKKVAVVRTPPKSPSSAKSRLQTAPVPMPDLKNVKSKIGSTENLKHQPGGGKVQIVYKPVDLSKVTSKCGSLGNIHHKPGGGQVEVKSEKLDFKDRVQSKIGSLDNITHVPGGGNKKIETHKLTFRENAKAKTDHGAEIVYKSPVVSGDTSPRHLSNVSSTGSIDMVDSPQLATLADEVSASLAKQGL

SEQ ID NO: 1427 - protein, 900 aa, Homo Sapiens
MRLFVSDGVPGCLPVLAAAGRARGRAEVLISTVGPEDCVVPFLTRPKVPVLQLDSGNYLFSTSAICRYFFLLSGWEQDDLTNQWLEWEATELQPALSAALYYLVVQGKKGEDVLGSVRRALTHIDHSLSRQNCPFLAGETESLADIVLWGALYPLLQDPAYLPEELSALHSWFQTLSTQEPCQRAAETVLKQQGVLALRPYLQKQPQPSPAEGRAVTNEPEEEELATLSEEEIAMAVTAWEKGLESLPPLRPQQNPVLPVAGERNVLITSALPYVNNVPHLGNIIGCVLSADVFARYSRLRQWNTLYLCGTDEYGTATETKALEEGLTPQEICDKYHIIHADIYRWFNISFDIFGRTTTPQQTKITQDIFQQLLKRGFVLQDTVEQLRCEHCARFLADRFVEGVCPFCGYEEARGDQCDKCGKLINAVELKKPQCKVCRSCPVVQSSQHLFLDLPKLEKRLEEWLGRTLPGSDWTPNAQFITRSWLRDGLKPRCITRDLKWGTPVPLEGFEDKVFYVWFDATIGYLSITANYTDQWERWWKNPEQVDLYQFMAKDNVPFHSLVFPCSALGAEDNYTLVSHLIATEYLNYEDGKFSKSRGVGVFGDMAQDTGIPADIWRFYLLYIRPEGQDSAFSWTDLLLKNNSELLNNLGNFINRAGMFVSKFFGGYVPEMVLTPDDQRLLAHVTLELQHYHQLLEKVRIRDALRSILTISRHGNQYIQVNEPWKRIKGSEADRQRAGTVTGLAVNIAALLSVMLQPYMPTVSATIQAQLQLPPPACSILLTNFLCTLPAGHQIGTVSPLFQKLENDQIESLRQRFGGGQAKTSPKPAVVETVTTAKPQQIQALMDEVTKQGNIVRELKAQKADKNEVAAEVAKLLDLKKQLAVAEGKPPEAPKGKKKK

SEQ ID NO: 1428 - protein, 443 aa, Homo Sapiens
MEEDIDTRKINNSFLRDHSYATEADIISTVEFNHTGELLATGDKGGRVVIFQREQESKNQVHRRGEYNVYSTFQSHEPEFDYLKSLEIEEKINKIRWLPQQNAAYFLLSTNDKTVKLWKVSERDKRPEGYNLKDEEGRLRDPATITTLRVPVLRPMDLMVEATPRRVFANAHTYHINSISVNSDYETYMSADDLRINLWNFEITNQSFNIVDIKPANMEELTEVITAAEFHPHHCNTFVYSSSKGTIRLCDMRASALCDRHTKFFEEPEDPSNRSFFSEIISSISDVKFSHSGRYIMTRDYLTVKVWDLNMENRPIETYQVHDYLRSKLCSLYENDCIFDKFECVWNGSDSVIMTGSYNNFFRMFDRNTKRDVTLEASRENSKPRAILKPRKVCVGGKRRKDEISVDSLDFSKKILHTAWHPSENIIAVAATNNLYIFQDKVN

SEQ ID NO: 1429 - protein, 264 aa, Homo Sapiens
MEAFLGSRSGLWAGGPAPGQFYRIPSTPDSFMDPASALYRGPITRTQNPMVTGTSVLGVKFEGGVVIAADMLGSYGSLARFRNISRIMRVNNSTMLGASGDYADFQYLKQVLGQMVIDEELLGDGHSYSPRAIHSWLTRAMYSRRSKMNPLWNTMVIGGYADGESFLGYVDMLGVAYEAPSLATGYGAYLAQPLLREVLEKQPVLSQTEARDLVERCMRVLYYRDARSYNRFQIATVTEKGVEIEGPLSTETNWDIAHMISGFE

SEQ ID NO: 1430 - protein, 919 aa, Homo Sapiens [sequence omitted]

SEQ ID NO: 1431 - protein, 194 aa, Homo Sapiens [sequence omitted]

SEQ ID NO: 1432 - protein, 325 aa, Homo Sapiens
MSLLRSLRVFLVARTGSYPAGSLLRQSPQPRHTFYAGPRLSASASSKELLMKLRRKTGYSFVNCKKALETCGGDLKQAEIWLHKEAQKEGWSKAAKLQGRKTKEGLIGLLQEGNTTVLVEVNCETDFVSRNLKFQLLVQQVALGTMMHCQTLKDQPSAYSKGFLNSSELSGLPAGPDREGSLKDQLALAIGKLGENMILKRAAWVKVPSGFYVGSYVHGAMQSPSLHKLVLGKYGALVICETSEQKTNLEDVGRRLGQHVVGMAPLSVGSLDDEPGGEAETKMLSQPYLLDPSITLGQYVQPQGVSVVDFVRFECGEGEEAAETE

SEQ ID NO: 1433 - protein, 300 aa, Homo Sapiens
MILLEVNNRIIEETLALKFENAAAGNKPEAVEVTFADFDGVLYHISNPNGDKTKVMVSISLKFYKELQAHGADELLKRVYGSFLVNPESGYNVSLLYDLENLPASKDSIVHQAGMLKRNCFASVFEKYFQFQEEGKEGENRAVIHYRDDETMYVESKKDRVTVVFSTVFKDDDDVVIGKVFMQEFKEGRRASHTAPQVLFSHREPPLELKDTDAAVGDNIGYITFVLFPRHTNASARDNTINLIHTFRDYLHYHIKCSKAYIHTRMRAKTSDFLKVLNRARPDAEKKEMKTITGKTFSSR

SEQ ID NO: 1434 - protein, 835 aa, Homo Sapiens
MAASAAAASAAAASAASGSPGPGEGSAGGEKRSTAPSAAASASASAAASSPAGGGAEALELLEHCGVCRERLRPEREPRLLPCLHSACSACLGPAAPAAANSSGDGGAAGDGTVVDCPVCKQQCFSKDIVENYFMRDSGSKAATDAQDANQCCTSCEDNAPATSYCVECSEPLCETCVEAHQRVKYTKDHTVRSTGPAKSRDGERTVYCNVHKHEPLVLFCESCDTLTCRDCQLNAHKDHQYQFLEDAVRNQRKLLASLVKRLGDKHATLQKSTKEVRSSIRQVSDVQKRVQVDVKMAILQIMKELNKRGRVLVNDAQKVTEGQQERLERQHWTMTKIQKHQEHILRFASWALESDNNTALLLSKKLIYFQLHRALKMIVDPVEPHGEMKFQWDLNAWTKSAEAFGKIVAERPGTNSTGPAPMAPPRAPGPLSKQGSGSSQPMEVQEGYGFGSGDDPYSSAEPHVSGVKRSRSGEGEVSGLMRKVPRVSLERLDLDLTADSQPPVFKVFPGSTTEDYNLIVIERGAAAAATGQPGTAPAGTPGAPPLAGMAIVKEEETEAAIGAPPTATEGPETKPVLMALAEGPGAEGPRLASPSGSTSSGLEVVAPEGTSAPGGGPGTLDDSATICRVCQKPGDLVMCNQCEFCFHLDCHLPALQDVPGEEWSCSLCHVLPDLKEEDGSLSLDGADSTGVVAKLSPANQRKCERVLLALFCHEPCRPLHQLATDSTFSLDQPGGTLDLTLIRARLQEKLSPPYSSPQEFAQDVGRMFKQFNKLTEDKADVQSIIGLQRFFETRMNEAFGDTKFSAVLVEPPPMSLPGAGLSSQELSGGPGDGP

SEQ ID NO: 1435 - protein, 394 aa, Homo Sapiens
MSREMQDVDLAEVKPLVEKGETITGLLQEFDVQEQDIETLHGSVHVTLCGTPKGNRPVILTYHDIGMNHKTCYNPLFNYEDMQEITQHFAVCHVDAPGQQDGAASFPAGYMYPSMDQLAEMLPGVLQQFGLKSIIGMGTGAGAYILTRFALNNPEMVEGLVLINVNPCAEGWMDWAASKISGWTQALPDMVVSHLFGKEEMQSNVEVVHTYRQHIVNDMNPGNLHLFINAYNSRRDLEIERPMPGTHTVTLQCPALLVVGDSSPAVDAVVECNSKLDPTKTTLLKMADCGGLPQISQPAKLAEAFKYFVQGMGYMPSASMTRLMRSRTASGSSVTSLDGTRSRSHTSEGTRSRSHTSEGTRSRSHTSEGAHLDITPNSGAAGNSAGPKSMEVSC

SEQ ID NO: 1436 - protein, 370 aa, Homo Sapiens
MSLHQFLLEPITCHAWNRDRTQIALSPNNHEVHIYKKNGSQWVKAHELKEHNGHITGIDWAPKSDRIVTCGADRNAYVWSQKDGVWKPTLVILRINRAATFVKWSPLENKFAVGSGARLISVCYFESENDWWVSKHIKKPIRSTVLSLDWHPNNVLLAAGSCDFKCRVFSAYIKEVDEKPASTPWGSKMPFGQLMSEFGGSGTGGWVHGVSFSASGSRLAWVSHDSTVSVADASKSVQVSTLKTEFLPLLSVSFVSENSVVAAGHDCCPMLFNYDDRGCLTFVSKLDIPKQSIQRNMSAMERFRNMDKRATTEDRNTALETLHQNSITQVSIYEVDKQDCRKFCTTGIDGAMTIWDFKTLESSIQGLRIM

SEQ ID NO: 1437 - protein, 193 aa, Homo Sapiens [sequence omitted]

SEQ ID NO: 1438 - protein, 1608 aa, Homo Sapiens
MYSAHRPLMPASSAASRGLGMFVWTNVEPRSVAVFPWHSLVPFLAPSQPDPSVQPSEAQQPASHPVASNQSKEPAESAAVAHERPPGGTGSADPERPPGATCPESPGPGPPHPLGVVESGKGPPPTTEEEASGPPGEPRLDSETESDHDDAFLSIMSPEIQLPLPPGKRRTQSLSALPKERDSSSEKDGRSPNKREKDHIRRPMNAFMIFSKRHRALVHQRHPNQDNRTVSKILGEWWYALGPKEKQKYHDLAFQVKEAHFKAHPDWKWCNKDRKKSSSEAKPTSLGLAGGHKETRERSMSETGTAAAPGVSSELLSVAAQTLLSSDTKAPGSSSCGAERLHTVGGPGSARPRAFSHSGVHSLDGGEVDSQALQELTQMVSGPASYSGPKPSTQYGAPGPFAAPGEGGALAATGRPPLLPTRASRSQRAASEDMTSDEERMVICEEEGDDDVIADDGFGTTDIDLKCKERVTDSESGDSSGEDPEGNKGFGRKVFSPVIRSSFTHCRPPLDPEPPGPPDPPVAFGKGYGSAPSSSASSPASSSASAATSFSLGSGTFKAQESGQGSTAGPLRPPPPGAGGPATPSKATRFLPMDPATFRRKRPESVGGLEPPGPSVIAAPPSGGGNILQTLVLPPNKEEQEGGGARVPSAPAPSLAYGAPAAPLSRPAATMVTNVVRPVSSTPVPIASKPFPTSGRAEASPNDTAGARTEMGTGSRVPGGSPLGVSLVYSDKKSAAATSPAPHLVAGPLLGTVGKAPATVTNLLVGTPGYGAPAPPAVQFIAQGAPGGGTTAGSGAGAGSGPNGPVPLGILQPGALGKAGGITQVQYILPTLPQQLQVAPAPAPAPGTKAAAPSGPAPTTSIRFTLPPGTSTNGKVLAATAPTPGIPILQSVPSAPPPKAQSVSPVQAPPPGGSAQLLPGKVLVPLAAPSMSVRGGGAGQPLPLVSPPFSVPVQNGAQPPSKIIQLTPVPVSTPSGLVPPLSPATLPGPTSQPQKVLLPSSTRITYVQSAGGHALPLGTSPASSQAGTVTSYGPTSSVALGFTSLGPSGPAFVQPLLSAGQAPLLAPGQVGVSPVPSPQLPPACAAPGGPVITAFYSGSPAPTSSAPLAQPSQAPPSLVYTVATSTTPPAATILPKGPPAPATATPAPTSPFPSATAGSMTYSLVAPKAQRPSPKAPQKVKAAIASIPVGSFEAGASGRPGPAPRQPLEPGPVREPTAPESELEGQPTPPAPPPLPETWTPTARSSPPLPPPAEERTSAKGPETMASKFPSSSSDWRVPGQGLENRGEPPTPPSPAPAPAVAPGGSSESSSGRAAGDTPERKEAAGTGKKVKVRPPPLKKTFDSVDNRVLSEVDFEERFAELPEFRPEEVLPSPTLQSLATSPRAILGSYRKKRKNSTDLDSAPEDPTSPKRKMRRRSSCSSEPNTPKSAKCEGDIFTFDRTGTEAEDVLGELEYDKVPYSSLRRTLDQRRALVMQLFQDHGFFPSAQATAAFQARYADIFPSKVCLQLKIREVRQKIMQAATPTEQPPGAEAPLPVPPPTGTAAAPAPTPSPAGGPDPTSPSSDSGTAQAAPPLPPPPESGPGQPGWEGAPQPSPPPPGPSTAATGR

SEQ ID NO: 1439 - protein, 217 aa, Homo Sapiens
MGSTVPRSASVLLLLLLLRRAEQPCGAELTFELPDNAKQCFHEEVEQGVKFSLDYQVITGGHYDVDCYVEDPQGNTIYRETKKQYDSFTYRAEVKGVYQFCFSNEFSTFSHKTVYFDFQVGDEPPILPDMGNRVTALTQMESACVTIHEALKTVIDSQTHYRLREAQDRARAEDLNSRVSYWSVGETIALFVVSFSQVLLLKSFFTEKRPISRAVHS

SEQ ID NO: 1440 - protein, 636 aa, Homo Sapiens
MNPSAPSYPMASLYVGDLHPDVTEAMLYEKFSPAGPILSIRVCRDMITRRSLGYAYVNFQQPADAERALDTMNFDVIKGKPVRIMWSQRDPSLRKSGVGNIFIKNLDKSIDNKALYDTFSAFGNILSCKVVCDENGSKGYGFVHFETQEAAERAIEKMNGMLLNDRKVFVGRFKSRKEREAELGARAKEFTNVYIKNFGEDMDDERLKDLFGKFGPALSVKVMTDESGKSKGFGFVSFERHEDAQKAVDEMNGKELNGKQIYVGRAQKKVERQTELKRKFEQMKQDRITRYQGVNLYVKNLDDGIDDERLRKEFSPFGTITSAKVMMEGGRSKGFGFVCFSSPEEATKAVTEMNGRIVATKPLYVALAQRKEERQAHLTNQYMQRMASVRAVPNPVINPYQPAPPSGYFMAAIPQTQNRAAYYPPSQIAQLRPSPRWTAQGARPHPFQNMPGAIRPAAPRPPFSTMRPASSQVPRVMSTQRVANTSTQTMGPRPAAAAAAATPAVRTVPQYKYAAGVRNPQQHLNAQPQVTMQQPAVHVQGQEPLTASMLASAPPQEQKQMLGERLFPLIQAMHPTLAGKITGMLLEIDNSELLHMLESPESLRSKVDEAVAVLQAHQAKEAAQKAVNSATGVPTV

SEQ ID NO: 1441 - protein, 395 aa, Homo Sapiens
MDFNMKKLASDAGIFFTRAVQFTEEKFGQAEKTELDAHFENLLARADSTKNWTEKILRQTEVLLQPNPSARVEEFLYEKLDRKVPSRVTNGELLAQYMADAASELGPTTPYGKTLIKVAEAEKQLGAAERDFIHTASISFLTPLRNFLEGDWKTISKERRLLQNRRLDLDACKARLKKAKAAEAKATTVPDFQETRPRNYILSASASALWNDEVDKAEQELRVAQTEFDRQAEVTRLLLEGISSTHVNHLRCLHEFVKSQTTYYAQCYRHMLDLQKQLGRFPGTFVGTTEPASPPLSSTSPTTAAATMPVVPSVASLAPPGEASLCLEEVAPPASGTRKARVLYDYEAADSSELALLADELITVYSLPGMDPDWLIGERGNKKGKVPVTYLELLS

SEQ ID NO: 1442 - protein, 613 aa, Homo Sapiens
MGALRPTLLPPSLPLLLLLMLGMGCWAREVLVPEGPLYRVAGTAVSISCNVTGYEGPAQQNFEWFLYRPEAPDTALGIVSTKDTQFSYAVFKSRVVAGEVQVQRLQGDAVVLKIARLQAQDAGIYECHTPSTDTRYLGSYSGKVELRVLPDVLQVSAAPPGPRGRQAPTSPPRMTVHEGQELALGCLARTSTQKHTHLAVSFGRSVPEAPVGRSTLQEVVGIRSDLAVEAGAPYAERLAAGELRLGKEGTDRYRMVVGGAQAGDAGTYHCTAAEWIQDPDGSWAQIAEKRAVLAHVDVQTLSSQLAVTVGPGERRIGPGEPLELLCNVSGALPPAGRHAAYSVGWEMAPAGAPGPGRLVAQLDTEGVGSLGPGYEGRHIAMEKVASRTYRLRLEAARPGDAGTYRCLAKAYVRGSGTRLREAASARSRPLPVHVREEGVVLEAVAWLAGGTVYRGETASLLCNISVRGGPPGLRLAASWWVERPEDGELSSVPAQLVGGVGQDGVAELGVRPGGGPVSVELVGPRSHRLRLHSLGPEDEGVYHCAPSAWVQHADYSWYQAGSARSGPVTVYPYMHALDTLFVPLLVGTGVALVTGATVLGTITCCFMKRLRKR

SEQ ID NO: 1443 - protein, 382 aa, Homo Sapiens
MLRWTVHLEGGPRRVNHAAVAVGHRVYSFGGYCSGEDYETLRQIDVHIFNAVSLRWTKLPPVKSAIRGQAPVVPYMRYGHSTVLIDDTVLLWGGRNDTEGACNVLYAFDVNTHKWFTPRVSGTVPGARDGHSACVLGKIMYIFGGYEQQADCFSNDIHKLDTSTMTWTLICTKGSPARWRDFHSATMLGSHMYVFGGRADRFGPFHSNNEIYCNRIRVFDTRTEAWLDCPPTPVLPEGRRSHSAFGYNGELYIFGGYNARLNRHFHDLWKFNPVSFTWKKIEPKGKGPCPRRRQCCCIVGDKIVLFGGTSPSPEEGLGDEFDLIDHSDLHILDFSPSLKTLCKLAVIQYNLDQSCLPHDIRWELNAMTTNSNISRPIVSSHG

SEQ ID NO: 1444 - protein, 252 aa, Homo Sapiens
MQLPPALCARLAAGPGAAEPLPVERDPAAGAAPFRFVARPVRFPREHQFFEDGDVQRHLYLQDVIMQVADVPEKPRVPAFACQVAGCCQVFDALDDYEHHYHTLHGNVCSFCKRAFPSGHLLDAHILEWHDSLFQILSERQDMYQCLVEGCTEKFKTSRDRKDHMVRMHLYPADFRFDKPKKSRSPASAEAPGDSGERSEGEAMEICSEPVAASPAPAGERRIYRHRIPSTICFGQGAARGFKSNKKKTKQC

SEQ ID NO: 1445 - protein, 461 aa, Homo Sapiens
MNNFGNEEFDCHFLDEGFTAKDILDQKINEVSSSDDKDAFYVADLGDILKKHLRWLKALPRVTPFYAVKCNDSKAIVKTLAATGTGFDCASKTEIQLVQSLGVPPERIIYANPCKQVSQIKYAANNGVQMMTFDSEVELMKVARAHPKAKLVLRIATDDSKAVCRLSVKFGATLRTSRLLLERAKELNIDVVGVSFHVGSGCTDPETFVQAISDARCVFDMGAEVGFSMYLLDIGGGFPGSEDVKLKFEEITGVINPALDKYFPSDSGVRIIAEPGRYYVASAFTLAVNIIAKKIVLKEQTGSDDEDESSEQTFMYYVNDGVYGSFNCILYDHAHVKPLLQKRPKPDEKYYSSSIWGPTCDGLDRIVERCDLPEMHVGDWMLFENMGAYTVAAASTFNGFQRPTIYYVMSGPAWQLMQQFQNPDFPPEVEEQDASTLPVSCAWESGMKRHRAACASASINV

SEQ ID NO: 1446 - protein, 115 aa, Homo Sapiens
MRYVASYLLAALGGNSSPSAKDIKKILDSVGIEADDDRLNKVISELNGKNIEDVIAQGIGKLASVPAGGAVAVSAAPGSAAPAAGSAPAAAEEKKDEKKEESEESDDDMGFGLFD

SEQ ID NO: 1447 - protein, 607 aa, Homo Sapiens
MEAPAAGLFLLLLLGTWAPAPGSASSEAPPLINEDVKRTVDLSSHLAKVTAEVVLAHLGGGSTSRATSFLLALEPELEARLAHLGVQVKGEDEEENNLEVRETKIKGKSGRFFTVKLPVALDPGAKISVIVETVYTHVLHPYPTQITQSEKQFVVFEGNHYFYSPYPTKTQTMRVKLASRNVESYTKLGNPTRSEDLLDYGPFRDVPAYSQDTFKVHYENNSPFLTITSMTRVIEVSHWGNIAVEENVDLKHTGAVLKGPFSRYDYQRQPDSGISSIRSFKTILPAAAQDVYYRDEIGNVSTSHLLILDDSVEMEIRPRFPLFGGWKTHYIVGYNLPSYEYLYNLGDQYALKMRFVDHVFDEQVIDSLTVKIILPEGAKNIEIDSPYEISRAPDELHYTYLDTFGRPVIVAYKKNLVEQHIQDIVVHYTFNKVLMLQEPLLVVAAFYILFFTVIIYVRLDFSITKDPAAEARMKVACITEQVLTLVNKRIGLYRHFDETVNRYKQSRDISTLNSGKKSLETEHKALTSEIALLQSRLKTEGSDLCDRVSEMQKLDAQVKELVLKSAVEAERLVAGKLKKDTYIENEKLISGKRQELVTKIDHILDAL

SEQ ID NO: 1448 - protein, 2477 aa, Homo Sapiens
MDPSGVKVLETAEDIQERRQQVLDRYHRFKELSTLRRQKLEDSYRFQFFQRDAEELEKWIQEKLQIASDENYKDPTNLQGKLQKHQAFEAEVQANSGAIVKLDETGNLMISEGHFASETIRTRLMELHRQWELLLEKMREKGIKLLQAQKLVQYLRECEDVMDWINDKEAIVTSEELGQDLEHVEVLQKKFEEFQTDMAAHEERVNEVNQFAAKLIQEQHPEEELIKTKQDEVNAAWQRLKGLALQRQGKLFGAAEVQRFNRDVDETISWIKEKEQLMASDDFGRDLASVQALLRKHEGLERDLAALEDKVKALCAEADRLQQSHPLSATQIQVKREELITNWEQIRTLAAERHARLNDSYRLQRFLADFRDLTSWVTEMKALINADELASDVAGAEALLDRHQEHKGEIDAHEDSFKSADESGQALLAAGHYASDEVREKLTVLSEERAALLELWELRRQQYEQCMDLQLFYRDTEQVDNWMSKQEAFLLNEDLGDSLDSVEALLKKHEDFEKSLSAQEEKITALDEFATKLIQNNHYAMEDVATRRDALLSRRNALHERAMRRRAQLADSFHLQQFFRDSDELKSWVNEKMKTATDEAYKDPSNLQGKVQKHQAFEAELSANQSRIDALEKAGQKLIDVNHYAKDEVAARMNEVISLWKKLLEATELKGIKLREANQQQQFNRNVEDIELWLYEVEGHLASDDYGKDLTNVQNLQKKHALLEADVAAHQDRIDGITIQARQFQDAGHFDAENIKKKQEALVARYEALKEPMVARKQKLADSLRLQQLFRDVEDEETWIREKEPIAASTNRGKDLIGVQNLLKKHQALQAEIAGHEPRIKAVTQKGNAMVEEGHFAAEDVKAKLHELNQKWEALKAKASQRRQDLEDSLQAQQYFADANEAESWMREKEPIVGSTDYGKDEDSAEALLKKHEALMSDLSAYGSSIQALREQAQSCRQQVAPTDDETGKELVLALYDYQEKSPREVTMKKGDILTLLNSTNKDWWKVEVNDRQGFVPAAYVKKLDPAQSASRENLLEEQGSIALRQEQIDNQTRITKEAGSVSLRMKQVEELYHSLLELGEKRKGMLEKSCKKFMLFREANELQQWINEKEAALTSEEVGADLEQVEVLQKKFDDFQKDLKANESRLKDINKVAEDLESEGLMAEEVQAVQQQEVYGMMPRDETDSKTASPWKSARLMVHTVATFNSIKELNERWRSLQQLAEERSQLLGSAHEVQRFHRDADETKEWIEEKNQALNTDNYGHDLASVQALQRKHEGFERDLAALGDKVNSLGETAERLIQSHPESAEDLQEKCTELNQAWSSLGKRADQRKAKLGDSHDLQRFLSDFRDLMSWINGIRGLVSSDELAKDVTGAEALLERHQEHRTEIDARAGTFQAFEQFGQQLLAHGHYASPEIKQKLDILDQERADLEKAWVQRRMMLDQCLELQLFHRDCEQAENWMAAREAFLNTEDKGDSLDSVEALIKKHEDFDKAINVQEEKIAALQAFADQLIAAGHYAKGDISSRRNEVLDRWRRLKAQMIEKRSKLGESQTLQQFSRDVDEIEAWISEKLQTASDESYKDPTNIQLSKLLSKHQKHQAFEAELHANADRIRGVIDMGNSLIERGACAGSEDAVKARLAALADQWQFLVQKSAEKSQKLKEANKQQNFNTGIKDFDFWLSEVEALLASEDYGKDLASVNNLLKKHQLLEADISAHEDRLKDLNSQADSLMTSSAFDTSQVKDKRDTINGRFQKIKSMAASRRAKLNESHRLHQFFRDMDDEESWIKEKKLLVGSEDYGRDLTGVQNLRKKHKRLEAELAAHEPAIQGVLDTGKKLSDDNTIGKEEIQQRLAQFVEHWKELKQLAAARGQRLEESLEYQQFVANVEEEEAWINEKMTLVASEDYGDTLAAIQGLLKKHEAFETDFTVHKDRVNDVCTNGQDLIKKNNHHEENISSKMKGLNGKVSDLEKAAAQRKAKLDENSAFLQFNWKADVVESWIGEKENSLKTDDYGRDLSSVQTLLTKQETFDAGLQAFQQEGIANITALKDQLLAAKHVQSKAIEARHASLMKRWSQLLANSAARKKKLLEAQSHFRKVEDLFLTFAKKASAFNSWFENAEEDLTDPVRCNSLEEIKALREAHDAFRSSLSSAQADFNQLAELDRQIKSFRVASNPYTWFTMEALEETWRNLQKIIKERELELQKEQRRQEENDKLRQEFAQHANAFHQWIQETRTYLLDGSCMVEESGTLESQLEATKRKHQEIRAMRSQLKKIEDLGAAMEEALILDNKYTEHSTVGLAQQWDQLDQLGMRMQHNLEQQIQARNTTGVTEEALKEFSMMFKHFDKDKSGRLNHQEFKSCLRSLGYDLPMVEEGEPDPEFEAILDTVDPNRDGHVSLQEYMAFMISRETENVKSSEEIESAFRALSSEGKPYVTKEELYQNLTREQADYCVSHMKPYVDGKGRELPTAFDYVEFTRSLFVN

SEQ ID NO: 1449 - protein, 730 aa, Homo Sapiens
MGVCQRTRAPWKEKSQLERAALGFRKGGSGMFASGWNQTVPIEEAGSMAALLLLPLLLLLPLLLLKLHLWPQLRWLPADLAFAVRALCCKRALRARALAAAAADPEGPEGGCSLAWRLAELAQQRAAHTFLIHGSRRFSYSEAERESNRAARAFLRALGWDWGPDGGDSGEGSAGEGERAAPGAGDAAAGSGAEFAGGDGAARGGGAAAPLSPGATVALLLPAGPEFLWLWFGLAKAGLRTAFVPTALRRGPLLHCLRSCGARALVLAPEFLESLEPDLPALRAMGLHLWAAGPGTHPAGISDLLAEVSAEVDGPVPGYLSSPQSITDTCLYIFTSGTTGLPKAARISHLKILQCQGFYQLCGVHQEDVIYLALPLYHMSGSLLGIVGCMGIGATVVLKSKFSAGQFWEDCQQHRVTVFQYIGELCRYLVNQPPSKAERGHKVRLAVGSGLRPDTWERFVRRFGPLQVLETYGLTEGNVATINYTGQRGAVGRASWLYKHIFPFSLIRYDVTTGEPIRDPQGHCMATSPGEPGLLVAPVSQQSPFLGYAGGPELAQGKLLKDVFRPGDVFFNTGDLLVCDDQGFLRFHDRTGDTFRWKGENVATTEVAEVFEALDFLQEVNVYGVTVPGHEGRAGMAALVLRPPHALDLMQLYTHVSENLPPYARPRFLRLQESLATTETFKQQKVRMANEGFDPSTLSDPLYVLDQAVGAYLPLTTARYSALLAGNLRI

SEQ ID NO: 1450 - protein, 353 aa, Homo Sapiens
MSRSLDSARSFLERLEARGGREGAVLAGEFSKRCERYWAQEQEPLQTGLFCITLIKEKWLNEDIMLRTLKVTFQKESRSVYQLQYMSWPDRGVPSSPDHMLAMVEEARRLQGSGPEPLCVHCSAGCGRTGVLCTVDYVRQLLLTQMIPPDFSLFDVVLKMRKQRPAAVQTEEQYRFLYHTVAQMFCSTLQNASPHYQNIKENCAPLYDDALFLRTPQALLAIPRPPGGVLRSISVPGSPGHAMADTYAVVQKRGAPAGAGSGTQTGTGTGTGARSAEEAPLYSKVTPRAQRPGAHAEDARGTLPGRVPADQSPAGSGAYEDVAGGAQTGGLGFNLRIGRPKGPRDPPAEWTRV

SEQ ID NO: 1451 - protein, 336 aa, Homo Sapiens
MLQRGLWPWRTRLLPTPGTWRPARPWPLPPPPQVLRVKLCGNVKYYQSHHYSTVVPPDEITVIYRHGLPLVTLTLPSRKERCQFVVKPMLSTVGSFLQDLQNEDKGIKTAAIFTADGNMISASTLMDILLMNDFKLVINKIAYDVQCPKREKPSNEHTAEMEHMKSLVHRLFTILHLEESQKKREHHLLEKIDHLKEQLQPLEQVKAGIEAHSEAKTSGLLWAGLALLSIQGGALAWLTWWVYSWDIMEPVTYFITFANSMVFFAYFIVTRQDYTYSAVKSRQFLQFFHKKSKQQHFDVQQYNKLKEDLAKAKESLKQARHSLCLQMQVEELNEKN

SEQ ID NO: 1452 - protein, 184 aa, Homo Sapiens
MVRKLKFHEQKLLKQVDFLNWEVTDHNLHELRVLRRYRLQRREDYTRYNQLSRAVRELARRLRDLPERDQFRVRASAALLDKLYALGLVPTRGSLELCDFVTASSFCRRRLPTVLLKLRMAQHLQAAVAFVEQGHVRVGPDVVTDPAFLVTRSMEDFVTWVDSSKIKRHVLEYNEERDDFDLEA

SEQ ID NO: 1453 - protein, 399 aa, Homo Sapiens
MAHITINQYLQQVYEAIDSRDGASCAELVSFKHPHVANPRLQMASPEEKCQQVLEPPYDEMFAAHLRCTYAVGNHDFIEAYKCQTVIVQSFLRAFQAHKEENWALPVMYAVALDLRVFANNADQQLVKKGKSKVGDMLEKAAELLMSCFRVCASDTRAGIEDSKKWGMLFLVNQLFKIYFKINKLHLCKPLIRAIDSSNLKDDYSTAQRVTYKYYVGRKAMFDSDFKQAEEYLSFAFEHCHRSSQKNKRMILIYLLPVKMLLGHMPTVELLKKYHLMQFAEVTRAVSEGNLLLLHEALAKHEAFFIRCGIFLILEKLKIITYRNLFKKVYLLLKTHQLSLDAFLVALKFMQVEDVDIDEVQCILANLIYMGHVKGYISHQHQKLVVSKQNPFPPLSTVC

SEQ ID NO: 1454 - protein, 6306 aa, Homo Sapiens
MSVFLGPGMPSASLLVNLLSALLILFVFGETEIRFTGQTEFVVNETSTTVIRLIIERIGEPANVTAIVSLYGEDAGDFFDTYAAAFIPAGETNRTVYIAVCDDDLPEPDETFIFHLTLQKPSANVKLGWPRTVTVTILSNDNAFGIISFNMLPSIAVSEPKGRNESMPLTLIREKGTYGMVMVTFEVEGGPNPPDEDLSPVKGNITFPPGRATVIYNLTVLDDEVPENDEIFLIQLKSVEGGAEINTSRNSIEIIIKKNDSPVRFLQSIYLVPEEDHILIIPVVRGKDNNGNLIGSDEYEVSISYAVTTGNSTAHAQQNLDFIDLQPNTTVVFPPFIHESHLKFQIVDDTIPEIAESFHIMLLKDTLQGDAVLISPSVVQVTIKPNDKPYGVLSFNSVLFERTVIIDEDRISRYEEITVVRNGGTHGNVSANWVLTRNSTDPSPVTADIRPSSGVLHFAQGQMLATIPLTVVDDDLPEEAEAYLLQILPHTIRGGAEVSEPAELLFYIQDSDDVYGLITFFPMENQKIESSPGERYLSLSFTRLGGTKGDVRLLYSVLYIPAGAVDPLQAKEGILNISRRNDLIFPEQKTQVTTKLPIRNDAFLQNGAHFLVQLETVELLNIIPLIPPISPRFGEICNISLLVTPAIANGEIGFLSNLPIILHEPEDFAAEVVYIPLHRDGTDGQATVYWSLKPSGFNSKAVTPDDIGPFNGSVLFLSGQSDTTINITIKGDDIPEMNETVTLSLDRVNVENQVLKSGYTSRDLIILENDDPGGVFEFSPASRGPYVIKEGESVELHIIRSRGSLVKQFLHYRVEPRDSNEFYGNTGVLEFKPGEREIVITLLARLDGIPELDEHYWVVLSSHGERESKLGSATIVNITILKNDDPHGIIEFVSDGLIVMINESKGDAIYSAVYDVVRNRGNFGDVSVSWVVSPDFTQDVFPVQGTVVFGDQEFSKNITIYSLPDEIPEEMEEFTVILLNGTGGAKVGNRTTATLRIRRNDDPIYFAEPRVVRVQEGETANFTVLRNGSVDVTCMVQYATKDGKATARERDFIPVEKGETLIFEVGSRQQSISIFVNEDGIPETDEPFYIILLNSTGDTVVYQYGVATVIIEANDDPNGIFSLEPIDKAVEEGKTNAFWILRHRGYFGSVSVSWQLFQNDSALQPGQEFYETSGTVNFMDGEEAKPIILHAFPDKIPEFNEFYFLKLVNISGGSPGPGGQLAETNLQVTVMVPFNDDPFGVFILDPECLEREVAEDVLSEDDMSYITNFTILRQQGVFGDVQLGWEILSSEFPAGLPPMIDFLLVGIFPTTVHLQQHMRRHHSGTDALYFTGLEGAFGTVNPKYHPSRNNTIANFTFSAWVMPNANTNGFIIAKDDGNGSIYYGVKIQTNESHVTLSLHYKTLGSNATYIAKTTVMKYLEESVWLHLLIILEDGIIEFYLDGNAMPRGIKSLKGEAITDGPGILRIGAGINGNDRFTGLMQDVRSYERKLTLEEIYELHAMPAKSDLHPISGYLEFRQGETNKSFIISARDDNDEEGEELFILKLVSVYGGARISEENTTARLTIQKSDNANGLFGFTGACIPEIAEEGSTISCVVERTRGALDYVHVFYTISQIETDGINYLVDDFANASGTITFLPWQRSEVLNIYVLDDDIPELNEYFRVTLVSAIPGDGKLGSTPTSGASIDPEKETTDITIKASDHPYGLLQFSTGLPPQPKDAMTLPASSVPHITVEEEDGEIRLLVIRAQGLLGRVTAEFRTVSLTAFSPEDYQNVAGTLEFQPGERYKYIFINITDNSIPELEKSFKVELLNLEGGVAELFRVDGSGSGDGDMEFFLPTIHKRASLGVASQILVTIAASDHAHGVFEFSPESLFVSGTEPEDGYSTVTLNVIRHHGTLSPVTLHWNIDSDPDGDLAFTSGNITFEIGQTSANITVEILPDEDPELDKAFSVSVLSVSSGSLGAHINATLTVLASDDPYGIFIFSEKNRPVKVEEATQNITLSIIRLKGLMGKVLVSYATLDDMEKPPYFPPNLARATQGRDYIPASGFALFGANQSEATIAISILDDDEPERSESVFIELLNSTLVAKVQSRSIPNSPRLGPKVETIAQLIIIANDDAFGTLQLSAPIVRVAENHVGPIINVTRTGGAFADVSVKFKAVPITAIAGEDYSIASSDVVLLEGETSKAVPIYVINDIYPELEESFLVQLMNETTGGARLGALTEAVIIIEASDDPYGLFGFQITKLIVEEPEFNSVKVNLPIIRNSGTLGNVTVQWVATINGQLATGDLRVVSGNVTFAPGETIQTLLLEVLADDVPEIEEVIQVQLTDASGGGTIGLDRIANIIIPANDDPYGTVAFAQMVYRVQEPLERSSCANITVRRSGGHFGRLLLFYSTSDIDVVALAMEEGQDLLSYYESPIQGVPDPLWRTWMNVSAVGEPLYTCATLCLKEQACSAFSFFSASEGPQCFWMTSWISPAVNNSDFWTYRKNMTRVASLFSGQAVAGSDYEPVTRQWAIMQEGDEFANLTVSILPDDFPEMDESFLISLLEVHLMNISASLKNQPTIGQPNISTVVIALNGDAFGVFVIYNISPNTSEDGLFVEVQEQPQTLVELMIHRTGGSLGQVAVEWRVVGGTATEGLDFIGAGEILTFAEGETKKTVILTILDDSEPEDDESIIVSLVYTEGGSRILPSSDTVRVNILANDNVAGIVSFQTASRSVIGHEGEILQFHVIRTFPGRGNVTVNWKIIGQNLELNFANFSGQLFFPEGSLNTTLFVHLLDDNIPEEKEVYQVILYDVRTQGVPPAGIALLDAQGYAAVLTVEASDEPHGVLNFALSSRFVLLQEANITIQLFINREFGSLGAINVTYTTVPGMLSLKNQTVGNLAEPEVDFVPIIGFLILEEGETAAAINITILEDDVPELEEYFLVNLTYVGLTMAASTSFPPRLDSEGLTAQVIIDANDGARGVIEWQQSRFEVNETHGSLTLVAQRSREPLGHVSLFVYAQNLEAQVGLDYIFTPMILHFADGERYKNVNIMILDDDIPEGDEKFQLILTNPSPGLELGKNTIALIIVLANDDGPGVLSFNNSEHFFLREPTALYVQESVAVLYIVREPAQGLFGTVTVQFIVTEVNSSNESKDLTPSKGYIVLEEGVRFKALQISAILDTEPEMDEYFVCTLFNPTGGARLGVHVQTLITVLQNQAPLGLFSISAVENRATSIDIEEANRTVYLNVSRTNGIDLAVSVQWETVSETAFGMRGMDVVFSVFQSFLDESASGWCFFTLENLIYGIMLRKSSVTVYRWQGIFIPVEDLNIENPKTCEAFNIGFSPYFVITHEERNEEKPSLNSVFTFTSGFKLFLVQTIIILESSQVRYFTSDSQDYLIIASQRDDSELTQVFRWNGGSFVLHQKLPVRGVLTVALFNKGGSVFLAISQANARLNSLLFRWSGSGFINFQEVPVSGTTEVEALSSANDIYLIFAENVFLGDQNSIDIFIWEMGQSSFRYFQSVDFAAVNRIHSFTPASGIAHILLIGQDMSALYCWNSERNQFSFVLEVPSAYDVASVTVKSLNSSKNLIALVGAHSHIYELAYISSHSDFIPSSGELIFEPGEREATIAVNILDDTVPEKEESFKVQLKNPKGGAEIGINDSVTITILSNDDAYGIVAFAQNSLYKQVEEMEQDSLVTLNVERLKGTYGRITIAWEADGSISDIFPTSGVILFTEGQVLSTITLTILADNIPELSEVVIVTLTRITTEGVEDSYKGATIDQDRSKSVITTLPNDSPFGLVGWRAASVFIRVAEPKENTTTLQLQIARDKGLLGDIAIHLRAQPNFLLHVDNQATENEDYVLQETIIIMKENIKEAHAEVSILPDDLPELEEGFIVTITEVNLVNSDFSTGQPSVRRPGMEIAEIMIEENDDPRGIFMFHVTRGAGEVITAYEVPPPLNVLQVPVVRLAGSFGAVNVYWKASPDSAGLEDFKPSHGILEFADKQVTAMIEITIIDDAEFELTETFNISLISVAGGGRLGDDVVVTVVIPQNDSPFGVFGFEEKTVMIDESLSSDDPDSYVTLTVVRSPGGKGTVRLEWTIDEKAKHNLSPLNGTLHFDETESQKTIVLHTLQDTVLEEDRRFTIQLISIDEVEISPVKGSASIIIRGDKRASGEVGIAPSSRHILIGEPSAKYNGTAIISLVRGPGILGEVTVFWRIFPPSVGEFAETSGKLTMRDEQSAVIVVIQALNDDIPEEKSFYEFQLTAVSEGGVLSESSSTANITVVASDSPYGRFAFSHEQLRVSEAQRVNITIIRSSGDFGHVRLWYKTMSGTAEAGLDFVPAAGELLFEAGEMRKSLHVEILDDDYPEGPEEFSLTITKVELQGRGYDFTIQENGLQIDQPPEIGNISIVRIIIMKNDNAEGIIEFDPKYTAFEVEEDVGLIMIPVVRLHGTYGYVTADFISQSSSASPGGVDYILHGSTVTFQHGQNLSFINISIIDDNESEFEEPIEILLTGATGGAVLGRHLVSRIIIAKSDSPFGVIRFLNQSKISIANPNSTMILSLVLERTGGLLGEIQVNWETVGPNSQEALLPQNRDIADPVSGLFYFGEGEGGVRTIILTIYPHEEIEVEETFIIKLHLVKGEAKLDSRAKDVTLTIQEFGDPNGVVQFAPETLSKKTYSEPLALEGPLLITFFVRRVKGTFGEIMVYWELSSEFDITEDFLSTSGFFTIADGESEASFDVHLLPDEVPEIEEDYVIQLVSVEGGAELDLEKSITWFSVYANDDPHGVFALYSDRQSILIGQNLIRSIQINITRLAGTFGDVAVGLRISSDHKEQPIVTENAERQLVVKDGATYKVDVVPIKNQVFLSLGSNFTLQLVTVMLVGGRFYGMPTILQEAKSAVLPVSEKAANSQVGFESTAFQLMNITAGTSHVMISRRGTYGALSVAWTTGYAPGLEIPEFIVVGNMTPTLGSLSFSHGEQRKGVFLWTFPSPGWPEAFVLHLSGVQSSAPGGAQLRSGFIVAEIEPMGVFQFSTSSRNIIVSEDTQMIRLHVQRLFGFHSDLIKVSYQTTAGSAKPLEDFEPVQNGELFFQKFQTEVDFEITIINDQLSEIEEFFYINLTSVEIRGLQKFDVNWSPRLNLDFSVAVITILDNDDLAGMDISFPETTVAVAVDTTLIPVETESTTYLSTSKTTTILQPTNVVAIVTEATGVSAIPEKLVTLHGTPAVSEKPDVATVTANVSIHGTFSLGPSIVYIEEEMKNGTFNTAEVLIRRTGGFTGNVSITVKTFGERCAQMEPNALPFRGIYGISNLTWAVEEEDFEEQTLTLIFLDGERERKVSVQILDDDEPEGQEFFYVFLTNPQGGAQIVEEKDDTGFAAFAMVIITGSDLHNGIIGFSEESQSGLELREGAVMRRLHLIVTRQPNRAFEDVKVFWRVTLNKTVVVLQKDGVNLVEELQSVSGTTTCTMGQTKCFISIELKPEKVPQVEVYFFVELYEATAGAAINNSARFAQIKILESDESQSLVYFSVGSRLAVAHKKATLISLQVARDSGTGLMMSVNFSTQELRSAETIGRTIISPAISGKDFVITEGTLVFEPGQRSTVLDVILTPETGSLNSFPKRFQIVLFDPKGGARIDKVYGTANITLVSDADSQAIWGLADQLHQPVNDDILNRVLHTISMKVATENTDEQLSAMMHLIEKITTEGKIQAFSVASRTLFYEILCSLINPKRKDTRGFSHFAEVTENFAFSLLTNVTCGSPGEKSKTILDSCPYLSILALHWYPQQINGHKFEGKEGDYIRIPERLLDVQDAEIMAGKSTCKLVQFTEYSSQQWFISGNNLPTLKNKVLSLSVKGQSSQLLTNDNEVLYRIYAAEPRIIPQTSLCLLWNQAAASWLSDSQFCKVVEETADYVECACSHMSVYAVYARTDNLSSYNEAFFTSGFICISGLCLAVLSHIFCARYSMFAAKLLTHMMAASLGTQILFLASAYASPQLAEESCSAMAAVTHYLYLCQFSWMLIQSVNFWYVLVMNDEHTERRYLLFFLLSWGLPAFVVILLIVILKGIYHQSMSQIYGLIHGDLCFIPNVYAALFTAALVPLTCLVVVFVVFIHAYQVKPQWKAYDDVFRGRTNAAEIPLILYLFALISVTWLWGGLHMAYRHFWMLVLFVIFNSLQGLYVFMVYFILHNQMCCPMKASYTVEMNGHPGPSTAFFTPGSGMPPAGGEISKSTQNLIGAMEEVPPDWERASFQQGSQASPDLKPSPQNGATFPSSGGYGQGSLIADEESQEFDDLIFALKTGAGLSVSDNESGQGSQEGGTLTDSQIVELRRIPIADTHL

SEQ ID NO: 1455 - protein, 189 aa, Homo Sapiens
MSRVPGPGGLGAAFSPLAGLHLALAGGLALRGCDPLPPGPPQPTTATGEEIGTRLSQMQGAVRDEAARTLVSGPWDSGGARGGGCSGPRCSLTFVSLASARLREQETRPWPGSSASHARTLGSVLSGAVGHTPEEAGVRAVGLGPLLVAVSGTRGGQYHRLRRGSAALHVRASYCLMENPPEPPSIVGS

SEQ ID NO: 1456 - protein, 110 aa, Homo Sapiens
MAASSSSSSAGGVSGSSVTGSGFSVSDLAPPRKALFTYPKGAGEMLEDGSERFLCESVFSYQVASTLKQVKHDQQVARMEKLAGLVEELEADEWRFKPIEQLLGFTPSSG

SEQ ID NO: 1457 - protein, 332 aa, Homo Sapiens
MATLKDQLIYNLLKEEQTPQNKITVVGVGAVGMACAISILMKDLADELALVDVIEDKLKGEMMDLQHGSLFLRTPKIVSGKDYNVTANSKLVIITAGARQQEGESRLNLVQRNVNIFKFIIPNVVKYSPNCKLLIVSNPVDILTYVAWKISGFPKNRVIGSGCNLDSARFRYLMGERLGVHPLSCHGWVLGEHGDSSVPVWSGMNVAGVSLKTLHPDLGTDKDKEQWKEVHKQVVESAYEVIKLKGYTSWAIGLSVADLAESIMKNLRRVHPVSTMIKGLYGIKDDVFLSVPCILGQNGISDLVKVTLTSEEEARLKKSADTLWGIQKELQF

SEQ ID NO: 1458 - protein, 357 aa, Homo Sapiens
MAPRRVRSFLRGLPALLLLLLFLGPWPAASHGGKYSREKNQPKPSPKRESGEEFRMEKLNQLWEKAQRLHLPPVRLAELHADLKIQERDELAWKKLKLDGLDEDGEKEARLIRNLNVILAKYGLDGKKDARQVTSNSLSGTQEDGLDDPRLEKLWHKAKTSGKFSGEELDKLWREFLHHKEKVHEYNVLLETLSRTEEIHENVISPSDLSDIKGSVLHSRHTELKEKLRSINQGLDRLRRVSHQGYSTEAEFEEPRVIDLWDLAQSANLTDKELEAFREELKHFEAKIEKHNHYQKQLEIAHEKLRHAESVGDGERVSRSREKHALLEGRTKELGYTVKKHLQDLSGRISRARHNEL

SEQ ID NO: 1459 - protein, 808 aa, Homo Sapiens
MAGTVVLDDVELREAQRDYLDFLDDEEDQGIYQSKVRELISDNQYRLIVNVNDLRRKNEKRANRLLNNAFEELVAFQRALKDFVASIDATYAKQYEEFYVGLEGSFGSKHVSPRTLTSCFLSCVVCVEGIVTKCSLVRPKVVRSVHYCPATKKTIERRYSDLTTLVAFPSSSVYPTKDEENNPLETEYGLSVYKDHQTITIQEMPEKAPAGQLPRSVDVILDDDLVDKAKPGDRVQVVGTYRCLPGKKGGYTSGTFRTVLIACNVKQMSKDAQPSFSAEDIAKIKKFSKTRSKDIFDQLAKSLAPSIHGHDYVKKAILCLLLGGVERDLENGSHIRGDINILLIGDPSVAKSQLLRYVLCTAPRAIPTTGRGSSGVGLTAAVTTDQETGERRLEAGAMVLADRGVVCIDEFDKMSDMDRTAIHEVMEQGRVTIAKAGIHARLNARCSVLAAANPVYGRYDQYKTPMENIGLQDSLLSRFDLLFIMLDQMDPEQDREISDHVLRMHRYRAPGEQDGDAMPLGSAVDILATDDPNFSQEDQQDTQIYEKHDNLLHGTKKKKEKMVSAAFMKKYIHVAKIIKPVLTQESATYIAEEYSRLRSQDSMSSDTARTSPVTARTLETLIRLATAHAKARMSKTVDLQDAEEAVELVQYAYFKKVLEKEKKRKKRSEDESETEDEEEKSQEDQEQKRKRRKTRQPDAKDGDSYDPYDFSDTEEEMPQVHTPKTADSQETKESQKVELSESRLKAFKVALLDVFREAHAQSIGMNRLTESINRDSEEPFSSVEIQAALSKMQDDNQVMVSEGIIFLI

SEQ ID NO: 1460 - protein, 419 aa, Homo Sapiens
MRGTQVHSVAGPSQWLGKPLTTRLLFPAAPCCCRPHYLFLAASGPRSLSTSAISFAEVQVQAPPVVAATPSPTAVPEVASGETADVVQTAAEQSFAELGLGSYTPVGLIQNLLEFMHVDLGLPWWGAIAACTVFARCLIFPLIVTGQREAARIHNHLPEIQKFSSRIREAKLAGDHIEYYKASSEMALYQKKHGIKLYKPLILPVTQAPIFISFFIALREMANLPVPSLQTGGLWWFQDLTVSDPIYILPLAVTATMWAVLELGAETGVQSSDLQWMRNVIRMMPLITLPITMHFPTAVFMYWLSSNLFSLVQVSCLRIPAVRTVLKIPQRVVHDLDKLPPREGFLESFKKGWKNAEMTRQLREREQRMRNQLELAARGPLRQTFTHNPLLQPGKDNPPNIPSSSSKPKSKYPWHDTLG

SEQ ID NO: 1461 - protein, 1291 aa, Homo Sapiens
MAGAASPCANGCGPGAPSDAEVLHLCRSLEVGTVMTLFYSKKSQRPERKTFQVKLETRQITWSRGADKIEGAIDIREIKEIRPGKTSRDFDRYQEDPAFRPDQSHCFVILYGMEFRLKTLSLQATSEDEVNMWIKGLTWLMEDTLQAPTPLQIERWLRKQFYSVDRNREDRISAKDLKNMLSQVNYRVPNMRFLRERLTDLEQRSGDITYGQFAQLYRSLMYSAQKTMDLPFLEASTLRAGERPELCRVSLPEFQQFLLDYQGELWAVDRLQVQEFMLSFLRDPLREIEEPYFFLDEFVTFLFSKENSVWNSQLDAVCPDTMNNPLSHYWISSSHNTYLTGDQFSSESSLEAYARCLRMGCRCIELDCWDGPDGMPVIYHGHTLTTKIKFSDVLHTIKEHAFVASEYPVILSIEDHCSIAQQRNMAQYFKKVLGDTLLTKPVEISADGLPSPNQLKRKILIKHKKLAEGSAYEEVPTSMMYSENDISNSIKNGILYLEDPVNHEWYPHYFVLTSSKIYYSEETSSDQGNEDEEEPKEVSSSTELHSNEKWFHGKLGAGRDGRHIAERLLTEYCIETGAPDGSFLVRESETFVGDYTLSFWRNGKVQHCRIHSRQDAGTPKFFLTDNLVFDSLYDLITHYQQVPLRCNEFEMRLSEPVPQTNAHESKEWYHASLTRAQAEHMLMRVPRDGAFLVRKRNEPNSYAISFRAEGKIKHCRVQQEGQTVMLGNSEFDSLVDLISYYEKHPLYRKMKLRYPINEEALEKIGTAEPDYGALYEGRNPGFYVEANPMPTFKCAVKALFDYKAQREDELTFIKSAIIQNVEKQEGGWWRGDYGGKKQLWFPSNYVEEMVNPVALEPEREHLDENSPLGDLLRGVLDVPACQIAIRPEGKNNRLFVFSISMASVAHWSLDVAADSQEELQDWVKKIREVAQTADARLTEGKIMERRKKIALELSELVVYCRPVPFDEEKIGTERACYRDMSSFPETKAEKYVNKAKGKKFLQYNRLQLSRIYPKGQRLDSSNYDPLPMWICGSQLVALNFQTPDKPMQMNQALFMTGRHCGYVLQPSTMRDEAFDPFDKSSLRGLEPCAISIEVLGARHLPKNGRGIVCPFVEIEVAGAEYDSTKQKTEFVVDNGLNPVWPAKPFHFQISNPEFAFLRFVVYEEDMFSDQNFLAQATFPVKGLKTGYRAVPLKNNYSEDLELASLLIKIDIFPAKQENGDLSPFSGTSLRERGSDASGQLFHGRAREGSFESRYQQPFEDFRISQEHLADHFDSRERRAPRRTRVNGDNRL

SEQ ID NO: 1462 - protein, 551 aa, Homo Sapiens
MDELFPLIFPAEPAQASGPYVEIIEQPKQRGMRFRYKCEGRSAGSIPGERSTDTTKTHPTIKINGYTGPGTVRISLVTKDPPHRPHPHELVGKDCRDGFYEAELCPDRCIHSFQNLGIQCVKKRDLEQAISQRIQTNNNPFQVPIEEQRGDYDLNAVRLCFQVTVRDPSGRPLRLPPVLSHPIFDNRAPNTAELKICRVNRNSGSCLGGDEIFLLCDKVQKEDIEVYFTGPGWEARGSFSQADVHRQVAIVFRTPPYADPSLQAPVRVSMQLRRPSDRELSEPMEFQYLPDTDDRHRIEEKRKRTYETFKSIMKKSPFSGPTDPRPPPRRIAVPSRSSASVPKPAPQPYPFTSSLSTINYDEFPTMVFPSGQISQASALAPAPPQVLPQAPAPAPAPAMVSALAQAPAPVPVLAPGPPQAVAPPAPKPTQAGEGTLSEALLQLQFDDEDLGALLGNSTDPAVFTDLASVDNSEFQQLLNQGIPVAPHTTEPMLMEYPEAITRLVTGAQRPPDPAPAPLGAPGLPNGLLSGDEDFSSIADMDFSALLSQISS

SEQ ID NO: 1463 - protein, 2025 aa, Homo Sapiens
MDNFAEGDFTVADYALLEDCPHVDDCVFAAEFMSNDYVRVTQLYCDGVGVQYKDYIQSERNLEFDICSIWCSKPISVLQDYCDAIKINIFWPLLFQHQNSSVISRLHPCVDANNSRASEINLKKLQHLELMEDIVDLAKKVANDSFLIGGLLRIGCKIENKILAMEEALNWIKYAGDVTILTKLGSIDNCWPMLSIFFTEYKYHITKIVMEDCNLLEELKTQSCMDCIEEGELMKMKGNEEFSKERFDIAIIYYTRAIEYRPENYLLYGNRALCFLRTGQFRNALGDGKRATILKNTWPKGHYRYCDALSMLGEYDWALQANIKAQKLCKNDPEGIKDLIQQHVKLQKQIEDLQGRTANKDPIKAFYENRAYTPRSLSAPIFTTSLNFVEKERDFRKINHEMANGGNQNLKVADEALKVDDCDCHPEFSPPSSQPPKHKGKQKSRNNESEKFSSSSPLTLPADLKNILEKQFSKSSRAAHQDFANIMKMLRSLIQDGYMALLEQRCRSAAQAFTELLNGLDPQKIKQLNLAMINYVLVVYGLAISLLGIGQPEELSEAENQFKRIIEHYPSEGLDCLAYCGIGKVYLKKNRFLEALNHFEKARTLIYRLPGVLTWPTSNVIIEESQPQKIKMLLEKFVEECKFPPVPDAICCYQKCHGYSKIQIYITDPDFKGFIRISCCQYCKIEFHMNCWKKLKTTTFNDKIDKDFLQGICLTPDCEGVISKIIIFSSGGEVKCEFEHKVIKEKVPPRPILKQKCSSLEKLRLKEDKKLKRKIQKKEAKKLAQERMEEDLRESNPPKNEEQKETVDNVQRCQFLDDRILQCIKQYADKIKSGIQNTAMLLKELLSWKVLSTEDYTTCFSSRNFLNEAVDYVIRHLIQENNRVKTRIFLHVLSELKEVEPKLAAWIQKLNSFGLDATGTFFSRYGASLKLLDFSIMTFLWNEKYGHKLDSIEGKQLDYFSEPASLKEARCLIWLLEEHRDKFPALHSALDEFFDIMDSRCTVLRKQDSGEAPFSSTKVKNKSKKKKPKDSKPMLVGSGTTSVTSNNEIITSSEDHSNRNSDSAGPFAVPDHLRQDVEEFEALYDQHSNEYVVRNKKLWDMNPKQKCSTLYDYFSQFLEEHGPLDMSNKMFSAEYEFFPEETRQILEKAGGLKPFLLGCPRFVVIDNCIALKKVASRLKKKRKKKNIKTKVEEISKAGEYVRVKLQLNPAAREFKPDVKSKPVSDSSSAPAFENVKPKPVSANSPKPACEDVKAKPVSDNSSRQVSEDGQPKGVSSNSPKPGSEDANYKRVSCNSPKPVLEDVKPTYWAQSHLVTGYCTYLPFQRFDITQTPPAYINVLPGLPQYTSIYTPLASLSPEYQLPRSVPVVPSFVANDRADKNAAAYFEGHHLNAENVAGHQIASETQILEGSLGISVKSHCSTGDAHTVLSESNRNDEHCGNSNNKCEVIPESTSAVTNIPHVQMVAIQVSWNIIHQEVNTEPYNPFEERQGEISRIEKEHQVLQDQLQEVYENYEQIKLKGLEETRDLEEKLKRHLEENKISKTELDWFLQDLEREIKKWQQEKKEIQERLKSLKKKIKKVSNASEMYTQKNDGKEKEHELHLDQSLEISNTLTNEKMKIEEYIKKGKEDYEESHQRAVAAEVSVLENWKESEVYKLQIMESQAEAFLKKLGLISRDPAAYPDMESDIRSWELFLSNVTKEIEKAKSQFEEQIKAIKNGSRLSELSKVQISELSFPACNTVHPELLPESSGDDGQGLVTSASDVTGNHAALHRDPSVFSAGDSPGEAPSALLPGPPPGQPEATQLTGPKRAGQAALSERSPVADRKQPVPPGRAARSSQSPKKPFNSIIEHLSVVFPCYNSTELAGFIKKVRSKNKNSLSGLSIDEIVQRVTEHILDEQKKKKPNPGKDKRTYEPSSATPVTRSSQGSPSVVVAPSPKTKGQKAEDVPVRIALGASSCEICHEVFKSKNVRVLKCGHKYHKGCFKQWLKGQSACPACQGRDLLTEESPSGRGWPSQNQELPSCSSR

SEQ ID NO: 1464 - protein, 782 aa, Homo Sapiens
MNSAEQTVTWLITLGVLESPKKTISDPEGFLQASLKDGVVLCRLLERLLPGTIEKVYPEPRSESECLSNIREFLRGCGASLRLETFDANDLYQGQNFNKVLSSLVTLNKVTADIGLGSDSVCARPSSHRIKSFDSLGSQSLHTRTSKLFQGQYRSLDMTDNSNNQLVVRAKFNFQQTNEDELSFSKGDVIHVTRVEEGGWWEGTLNGRTGWFPSNYVREVKASEKPVSPKSGTLKSPPKGFDTTAINKSYYNVVLQNILETENEYSKELQTVLSTYLRPLQTSEKLSSANISYLMGNLEEICSFQQMLVQSLEECTKLPEAQQRVGGCFLNLMPQMKTLYLTYCANHPSAVNVLTEHSEELGEFMETKGASSPGILVLTTGLSKPFMRLDKYPTLLKELERHMEDYHTDRQDIQKSMAAFKNLSAQCQEVRKRKELELQILTEAIRNWEGDDIKTLGNVTYMSQVLIQCAGSEEKNERYLLLFPNVLLMLSASPRMSGFIYQGKLPTTGMTITKLEDSENHRNAFEISGSMIERILVSCNNQQDLQEWVEHLQKQTKVTSVGNPTIKPHSVPSHTLPSHPVTPSSKHADSKPAPLTPAYHTLPHPSHHGTPHTTINWGPLEPPKTPKPWSLSCLRPAPPLRPSAALCYKEDLSKSPKTMKKLLPKRKPERKPSDEEFASRKSTAALEEDAQILKVIEAYCTSAKTRQTLNSTWQGTDLMHNHVLADDDQPSLDSLGRRSSLSRLEPSDLSEDSDYDSIWTAHSYRMGSTSRKSCCSYISHQN

SEQ ID NO: 1465 - protein, 1624 aa, Homo Sapiens
MAGQGDCCVKVAVRIRPQLSKEKIEGCHICTSVTPGEPQVLLGKDKAFTYDFVFDLDTWQEQIYSTCVSKLIEGCFEGYNATVLAYGQTGAGKTYTMGTGFDMATSEEEQGIIPRAIAHLFGGIAERKRRAQEQGVAGPEFKVSAQFLELYNEEILDLFDSTRDPDTRHRRSNIKIHEDANGGIYTTGVTSRLIHSQEELIQCLKQGALSRTTASTQMNVQSSRSHAIFTIHLCQMRMCTQPDLVNEAVTGLPDGTPPSSEYETLTAKFHFVDLAGSERLKRTGATGERAKEGISINCGLLALGNVISALGDQSKKVVHVPYRDSKLTRLLQDSLGGNSQTIMIACVSPSDRDFMETLNTLKYANRARNIKNKVVVNQDKTSQQISALRAEIARLQMELMEYKAGKRVIGEDGAEGYSDLFRENAMLQKENGALRLRVKAMQEAIDAINNRVTQLMSQEANLLLAKAGDGNEAIGALIQNYIREIEELRTKLLESEAMNESLRRSLSRASARSPYSLGASPAAPAFGGSPASSMEDASEVIRRAKQDLERLKKKEVRQRRKSPEKEAFKKRAKLQQENSEETDENEAEEEEEERDESGCEEEEGREDEDEDSGSEESLVDSDSDPEEKEVNFQADLADLTCEIEIKQKLIDELENSQRRLQTLKHQYEEKLILLQNKIRDTQLERDRVLQNLSTMECYTEEKANKIKADYEKRLREMNRDLQKLQAAQKEHARLLKNQSRYERELKKLQAEVAEMKKAKVALMKQMREEQQRRRLVETKRNREIAQLKKEQRRQEFQIRALESQKRQQEMVLRRKTQEVSALRRLAKPMSERVAGRAGLKPPMLDSGAEVSASTTSSEAESGARSVSSIVRQWNRKINHFLGDHPAPTVNGTRPARKKFQKKGASQSFSKAARLKWQSLERRIIDIVMQRMTIVNLEADMERLIKKREELFLLQEALRRKRERLQAESPEEEKGLQELAEEIEVLAANIDYINDGITDCQATIVQLEETKEELDSTDTSVVISSCSLAEARLLLDNFLKASIDKGLQVAQKEAQIRLLEGRLRQTDMAGSSQNHLLLDALREKAEAHPELQALIYNVQQENGYASTDEEISEFSEGSFSQSFTMKGSTSHDDFKFKSEPKLSAQMKAVSAECLGPPLDISTKNITKSLASLVEIKEDGVGFSVRDPYYRDRVSRTVSLPTRGSTFPRQSRATETSPLTRRKSYDRGQPIRSTDVGFTPPSSPPTRPRNDRNVFSRLTSNQSQGSALDKGIISPVGGAKGARTAPLQCVSMAEGHTKPILCLDATDELLFTGSKDRSCKMWNLVTGQEIAALKGHPNNVVSIKYCSHSGLVFSVSTSYIKVWDIRDSAKCIRTLTSSGQVISGDACAATSTRAITSAQGEHQINQIALSPSGTMLYAASGNAVRIWELSRFQPVGKLTGHIGPVMCLTVTQTASQHDLVVTGSKDHYVKMFELGECVTGTIGPTHNFEPPHYDGIECLAIQGDILFSGSRDNGIKKWDLDQQELIQQIPNAHKDWVCALAFIPGRPMLLSACRAGVIKVWNVDNFTPIGEIKGHDSPINAICTNAKHIFTASSDCRVKLWNYVPGLTPCLPRRVLAIKGRATTLP

SEQ ID NO: 1466 - protein, 271 aa, Homo Sapiens
MAAEEPQQQKQEPLGSDSEGVNCLAYDEAIMAQQDRIQQEIAVQNPLVSERLELSVLYKEYAEDDNIYQQKIKDLHKKYSYIRKTRPDGNCFYRAFGFSHLEALLDDSKELQRFKAVSAKSKEDLVSQGFTEFTIEDFHNTFMDLIEQVEKQTSVADLLASFNDQSTSDYLVVYLRLLTSGYLQRESKFFEHFIEGGRTVKEFCQQEVEPMCKESDHIHIIALAQALSVSIQVEYMDRGEGGTTNPHIFPEGSEPKVYLLYRPGHYDILYK

SEQ ID NO: 1467 - protein, 198 aa, Homo Sapiens
MATLWGGLLRLGSLLSLSCLALSVLLLAQLSDAAKNFEDVRCKCICPPYKENSGHIYNKNISQKDCDCLHVVEPMPVRGPDVEAYCLRCECKYEERSSVTIKVTIIIYLSILGLLLLYMVYLTLVEPILKRRLFGHAQLIQSDDDIGDHQPFANAHDVLARSRSRANVLNKVEYAQQRWKLQVQEQRKSVFDRHVVLS

SEQ ID NO: 1468 - protein, 168 aa, Homo Sapiens
MLPAALLRRPGLGRLVRHARAYAEAAAAPAAASGPNQMSFTFASPTQVFFNGANVRQVDVPTLTGAFGILAAHVPTLQVLRPGLVVVHAEDGTTSKYFVSSGSIAVNADSSVQLLAEEAVTLDMLDLGAAKANLEKAQAELVGTADEATRAEIQIRIEANEALVKALE

SEQ ID NO: 1469 - protein, 445 aa, Homo Sapiens
MALVDKHKVKRQRLDRICEGIRPQIMNGPLHPRPLVALLDGRDCTVEMPILKDLATVAFCDAQSTQEIHEKVLNEAVGAMMYHTITLTREDLEKFKALRVIVRIGSGYDNVDIKAAGELGIAVCNIPSAAVEETADSTICHILNLYRRNTWLYQALREGTRVQSVEQIREVASGAARIRGETLGLIGFGRTGQAVAVRAKAFGFSVIFYDPYLQDGIERSLGVQRVYTLQDLLYQSDCVSLHCNLNEHNHHLINDFTIKQMRQGAFLVNAARGGLVDEKALAQALKEGRIRGAALDVHESEPFSFAQGPLKDAPNLICTPHTAWYSEQASLEMREAAATEIRRAITGRIPESLRNCVNKEFFVTSAPWSVIDQQAIHPELNGATYRYPPGIVGVAPGGLPAAMEGIIPGGIPVTHNLPTVAHPSQAPSPNQPTKHGDNREHPNEQ

SEQ ID NO: 1470 - protein, 365 aa, Homo Sapiens
MGVPRPQPWALGLLLFLLPGSLGAESHLSLLYHLTAVSSPAPGTPAFWVSGWLGPQQYLSYNSLRGEAEPCGAWVWENQVSWYWEKETTDLRIKEKLFLEAFKALGGKGPYTLQGLLGCELGPDNTSVPTAKFALNGEEFMNFDLKQGTWGGDWPEALAISQRWQQQDKAANKELTFLLFSCPHRLREHLERGRGNLEWKEPPSMRLKARPSSPGFSVLTCSAFSFYPPELQLRFLRNGLAAGTGQGDFGPNSDGSFHASSSLTVKSGDEHHYCCIVQHAGLAQPLRVELESPAKSSVLVVGIVIGVLLLTAAAVGGALLWRRMRSGLPAPWISLRGDDTGVLLPTPGEAQDADLKDVNVIPATA

SEQ ID NO: 1471 - protein, 283 aa, Homo Sapiens
MSKSFQQSSLSRDSQGHGRDLSAAGIGLLAAATQSLSMLLESEDELLVDEEEAAALLESGSSVGDETDLANLGDVASDGKKEPSDKAVKKDGSASAAAKKKLKKRRFPGSMEGFVTLDEVGDEEDSELQKLRKSGMAFKSGDKNDDGLVEIKVDKIEELDQENEAALENGIKNEENTEPGAESSENADDPNKDTSENADGQSDENKDDYTIPDEYRIGPYQPNVPVGIDYVIPKTGFYCKLCSLFYTNEEVAKNTHCSSLPHYQKLKKFLNKLAEERRQKKET

SEQ ID NO: 1472 - protein, 320 aa, Homo Sapiens
MPKKKTGARKKAENRREREKQLRASRSTIDLAKHPCNASMECDKCQRRQKNRAFCYFCNSVQKLPICAQCGKTKCMMKSSDCVIKHAGVYSTGLAMVGAICDFCEAWVCHGRKCLSTHACACPLTDAECVECERGVWDHGGRIFSCSFCHNFLCEDDQFEHQASCQVLEAETFKCVSCNRLGQHSCLRCKACFCDDHTRSKVFKQEKGKQPPCPKCGHETQETKDLSMSTRSLKFGRQTGGEEGDGASGYDAYWKNLSSDKYGDTSYHDEEEDEYEAEDDEEEEDEGRKDSDTESSDLFTNLNLGRTYASGYAHYEEQEN

SEQ ID NO: 1473 - protein, 198 aa, Homo Sapiens
MAALTAEHFAALQSLLKASSKDVVRQLCQESFSSSALGLKKLLDVTCSSLSVTQEEAEELLQALHRLTRLVAFRDLSSAEAILALFPENFHQNLKNLLTKIILEHVSTWRTEAQANQISLPRLVDLDWRVDIKTSSDSISRMAVPTCLLQMKIQEDPSLCGDKPSISAVTVELSKETLDTMLDGLGRIRDQLSAVASK
